(19) United States
(12) Patent Application Publication
(10) Pub. No.: US 2004/0126870 A1
(43) Pub. Date: Jul. 1, 2004

(54) Ncc2705-the genome of a bifodobacterium

(76) Inventors: Fabrizio Arigoni, Geneva (CH); Michele Delley, Vauderens (CH); Beat Mollet, Lausanne (CH); Raymond David Pridmore, Lausanne (CH); Mark Alan Schell, Athens, GA (US); Thomas Pohl, Konstanz (DE); Marie-Camille Zwahlen, Lausanne (CH)

Correspondence Address: BELL, BOYD & LLOYD LLC, P. O. BOX 1135, CHICAGO, IL, 60690-1135, US

(21) Appl. No.: 10/470,565

(22) PCT Filed: Jan. 30, 2002
(86) PCT No.: PCT/EP02/00958

(30) Foreign Application Priority Data
Jan. 30, 2001 (EP) 01102050.0

(51) Int. Cl. C12N 1/20

(52) U.S. Cl. 435/252.2

(57) ABSTRACT

The present invention pertains to a novel micro-organism of the genus Bifidobacterium longum, in particular to its genomic and plasmid sequence and to a method of producing polypeptides of said Bifidobacterium, respectively. The invention also relates to methods of detecting these nucleic acids or polypeptides, respectively. A data carrier is provided comprising nucleotide sequences and/or polypeptide sequences of NCC2705. In addition, the present invention pertains to the Bifidobacterium longum strain NCC2705 and also to food and pharmaceutical compositions containing said Bifidobacterium or active components thereof for the prevention and/or treatment of diarrhoea brought about by rotaviruses and pathogenic bacteria.

[0001] The present invention pertains to a novel micro-organism of the genus Bifidobacterium longum, in particular to its genomic and plasmid sequence and to a method of producing polypeptides of said Bifidobacterium, respectively. The invention also relates to methods of detecting these nucleic acids or polypeptides, respectively. A data carrier is provided comprising nucleotide sequences and/or polypeptide sequences of NCC2705. In addition, the present invention pertains to the Bifidobacterium longum strain NCC2705 and also to food and pharmaceutical compositions containing said Bifidobacterium or active components thereof for the prevention and/or treatment of diarrhoea brought about by rotaviruses and pathogenic bacteria.

[0002] Organisms that produce lactic acid as a major metabolic component have been known since decades.

[0003] These bacteria are normally found in milk or in milk processing factories, respectively, living or decaying plants but also in the intestine of man and animals. These microorganisms, summarized under the term “lactic acid bacteria”, represent a rather inhomogeneous group and comprise the genera Lactococcus, Lactobacillus, Streptococcus, Bifidobacterium, Pediococcus etc.

[0004] Lactic acid bacteria have been utilized by mankind as fermenting agents for the preservation of food taking benefit of a low pH and the action of products generated during the fermentative activity thereof to inhibit the growth of spoilage bacteria. In addition, lactic acid bacteria have also been used for preparing a variety of different foodstuff such as cheese, yogurt and other fermented dairy products from milk.

[0005] Quite recently lactic acid bacteria have attracted a great deal of attention in that some strains have been found to exhibit valuable properties to man and animals upon ingestion. In particular, specific strains of the genus Lactobacillus or Bifidobacterium have been found to pass the gastrointestinal tract in a viable and live form without getting destroyed in the upper part thereof, especially by the impact of the low pH prevailing in the stomach and be able to colonize the intestinal mucosa, with their temporary or sustained maintenance in the gut being presumed to bring about numerous positive effects on the health of the living beings. These strains are generically termed probiotics.

[0006] EP 0 768 375 discloses such a specific strain of the genus Bifidobacterium, that is capable to become implanted in the intestinal flora and may adhere to intestinal cells. This Bifidobacterium is reported to assist in immuno-modulation, being capable to competitively exclude adhesion of pathogenic bacteria to intestinal cells, thus supporting the maintenance of the individual's health.

[0007] In view of the valuable properties particular strains of lactic acid bacteria may provide, there is a desire in the art for additional lactic acid bacterial strains that are beneficial to the well being of man and/or animal. In addition, a more detailed information is desired relating to the biology of these strains, in particular as regards the interaction with the hosts, the phenomena of passing different environmental conditions in the gut as well as having the capability to adhere to the intestine's mucosa and eventually the involvement in the enhancement of the immune system and defense against pathogens, which information will allow a better understanding of these mechanisms.

[0008] Consequently, a problem of the present invention is to provide substantial data about bacterial strains that exhibit properties beneficial for man and/or animals.

[0009] In view of said problem, a subject of the present invention resides in the nucleotide sequence having the sequence SEQ. ID. NO. 1 of the lactic acid bacterium Bifidobacterium longum NCC2705 genome and/or the nucleotide sequence SEQ ID. No 1099 of the plasmid contained tehrein. The invention is, however, not limited to the sequences indicated in SEQ. ID. NO. 1 and SEQ ID. NO. 2, respectively, but encompasses genomes and nucleotides encoding polypeptides of strain variants, polymorphisms, allelic variants, and mutants thereof.

[0010] In the figures,

[0011] FIG. 1 shows a graph, indicating the capability of Bifidobacterium longum NCC 2705 to adhere to human intestinal cells in culture; as a comparison another Bifidobacterium strain BL28 Cal was used;

[0012] FIG. 2 shows the pathogen sensitivity of pathogenic bacteria towards Bifidobacterium longum NCC2705;

[0013] FIG. 3 shows the activity of the cell lines NCC2705 and B1 28 against S. typhimurium SL1344 infecting Caco-2 cells;

[0014] FIG. 4 shows the rate of survival of mice infected with Salmonella typhimurium SL 1344 and treated with the Bifidobacterium NCC2705.

[0015] FIG. 5 shows a scheme illustrating the cell culture screening for assessing rotaviral protective properties of the bacterial strain NCC 2705.

[0016] The present invention is based on whole-genome sequencing of the genome of the Bifidobacterium longum strain NCC 2705, that has been deposited with the Institute Pasteur according to the Budapest Treaty on Jan. 29^{th}, 2001 receiving the deposit no. CNCM I-1-2618.

[0017] In a first aspect the present invention relates to nucleotide sequences selected from the group comprising (a) the nucleotide sequence of SEQ. ID. NO. 1; (b) a nucleotide sequence exhibiting at least 90% identity with the sequence of SEQ. ID. NO. 1; or (c) a nucleotide sequence that is homologous or hybridizes to SEQ ID. No. 1 under stringent conditions, or parts thereof.

[0018] In another aspect the invention relates to nucleotide sequences selected from the group comprising (a) the nucleotide sequence of SEQ. ID. NO. 2; (b) a nucleotide sequence exhibiting at least 90% identity with the sequence of SEQ. ID. NO. 2; or (c) a nucleotide sequence that is homologous or hybridizes to SEQ ID. NO. 2 under stringent conditions or parts thereof.

[0019] The terms genome or genomic sequence shall be understood to mean the sequence of the chromosome of Bifidobacterium longum. The term plasmid shall be understood to designate any extrachromosomal piece of DNA contained in the Bifidobacterium of the present invention. Nucleotide sequence, polynucleotide or nucleic acid are understood to desigante a double-stranded DNA, a single-stranded DNA or transcriptional products of the said DNAs at various length including oligonuclotides of about 10 to 100 nucleotides in length.

[0020] A homologous nucleotide sequence according to the present invention is understood to mean a nucleotide sequence having a percentage identity with the bases of the nucleotide sequence SEQ. ID. NO. 1 or SEQ. ID. NO. 2 of at least 90% and more preferably 95%, 96%, 97%, 98% or 99%. The said homologous may comprise, e.g., the sequences corresponding to the genomic sequence or to the sequences of its representative fragments of a bacterium belonging to the Bifidobacterium species, preferably the Bifidobacterium longum species, as well as the sequences corresponding to the genomic sequence or to the sequences of its representative fragments of a bacterium belonging to the variants of the species Bifidobacterium. In the present invention, the terms species and genus are mutually interchangeable.

[0021] These homologous sequences may thus correspond to variations linked to mutations within the same species or between species and may correspond in particular to truncations, substitutions, deletions and/or additions of at least one nucleotide. The said homologous sequences may also correspond to variations linked to the degeneracy of the genetic code or to a bias in the genetic code which is specific to the family, to the species or to the variant and which are likely to be present in Bifidobacterium.

[0022] Protein and/or nucleic acid sequence homologies may be evaluated using any of the variety of sequence comparison algorithms and programs known in the art. Such algorithms and programs include, but are by no means limited to, TBLASTN, BLASTP, FASTA, TFASTA, and CLUSTALW (see e.g. Pearson and Lipman, 1988, Proc. Natl. Acad. Sci. USA 85 (8): 2444-2448; Altschul et al., 1990, J. Mol. Biol. 215 (3): 403-410; Thompson et al., 1994, Nucleic Acids Res. 22 (2): 4673-4680; Higgins et al., 1996, Methods Enzymol. 266: 383-402; Altschul et al., 1990, J. Mol. Biol. 215 (3): 403-410; Altschul et al., 1993, Nature Genetics 3: 266-272).

[0023] In a particularly preferred embodiment, protein and nucleic acid sequence homologies are evaluated using the Basic Local Alignment Search Tool (“BLAST”) which is well known in the art (supra). In particular, four specific BLAST programs have been used to perform the following task:

[0024] (1) BLASTP: Compares an amino acid query sequence against a protein sequence database

[0025] (2) BLASTN: Compares a nucleotide query sequence against a nucleotide sequence database

[0026] (3) BLASTX: Compares a nucleotide query sequence translated in all reading frames against a protein sequence database

[0027] (4) TBLASTN: Compares a protein query sequence against a nucleotide sequence database dynamically translated in all reading frames

[0028] Among these representative fragments, those capable of hybridizing under stringent conditions with a nucleotide sequence according to the invention are preferred. Hybridization under stringent conditions means that the temperature and ionic strength conditions are chosen such that they allow hybridization to be maintained between two complementary DNA fragments. Such conditions of high stringency may e.g. be achieved by carrying out the hybridisation at a preferred temperature of 65° C. in the presence of SSC buffer, e.g. 1×SSC corresponding to 0.15 M NaCl and 0.05 M Na-citrate. The washing steps may be, for example, the following: 2×SSC, 0.1% SDS at room temperature followed by three washes with 1×SSC, 0.1% SDS; 0.5×SSC, 0.1% SDS; 0.1×SSC, 0.1% SDS at 68 C for 15 minutes.

[0029] The nucleotide sequences SEQ. ID. NO. 1 and SEQ. ID. NO. 2, respectively, have been obtained by sequencing the genome of and the plasmid contained in Bifidobacterium longum NCC2705 by the method of directed sequencing after fluorescent automated sequencing of the inserts of clones and assembling of these sequences of nucleotide fragments (inserts) by means of softwares. To this end, fragments of the genome were created, ligated into suitable vectors for amplification and propagation and the corresponding fragments were sequenced. Overlaps and the final arrangement of the fragments, the nucleotide sequence thereof, were assessed by the aid of appropiate softwares.

[0030] The present invention may be utilized for producing polypeptides by using the knowledge of the open reading frames (ORFs) as derived from SEQ. ID. NO. 1. Therefore, according to another aspect the present invention provides a method of producing a polypeptide by choosing an open reading frame (ORF) of the Bifidobacterium longum genome and expressing the polypeptide desired according to well known techniques.

[0031] Nucleic acid molecules derived from the genomic sequence as identified by SEQ. ID. NO. 1 may be obtained, by e.g. specific amplification of the corresponding sequence using the polymerase chain reaction. Due to the sequence information provided herein the skilled person may design and synthesize any suitable primer nucleotide and amplify a fragment of interest using the polymerase chain reaction. Therefore, the present invention also comprises nucleotide sequences selected from sequence SEQ. ID. NO. 1 which can be used as a primer for the amplification of nucleic acid sequences. Other techniques for amplifying the target nucleic acid may of course be also be used, such as e.g. the TAS (Transcription-based Amplification System) technique, the 3SR (Self-Sustained Sequence Replication) technique, the NASBA (Nucleic Acid Sequence Based Amplification) technique, the SDA (Strand Displacement Amplification) technique or the TMA (Transcription Mediated Amplification) technique etc.

[0032] The (poly)nucleotides may also be used as probes and techniques for amplifying or modifying a nucleic acid serving as a probe, such as e.g. the LCR (Ligase Chain Reaction) technique, the RCR (Repair Chain Reaction) technique, the CPR (Cycling Probe Reaction) technique or the Q-beta-replicase amplification technique may well be applied.

[0033] The present invention, therefore, envisages both hybridization (detection) probes and primers for detecting a nucleoide sequence (target nucleotide) of the present invention. In the case of the target being a RNA molecule, e.g. a mRNA, said mRNA may be directly detected or transformed to a cDNA prior to detection.

[0034] Alternatively, in order to obtain fragments of the nucleic acid represented by SEQ. ID. NO.1 the Bifidobacterium longum genomic DNA may be subjected to digestion with selected restriction enzymes, with the fargments being separated by e.g. electrophoresis or another suitable separation technique. Such techniques are well known in the art and are inter alia disclosed in Sambrook et al. A Laboratory Manual, Cold Spring Harbor, 1992. Such fragments may easily be obtained by isolating the genomic DNA of Bifidobacterium longum NCC2705 (CNCM I-2618) and performing the necessary steps.

[0035] In an alternative form the nucleic acids may also be obtained by chemical synthesis when they are not too large in size according to methods well known to a person skilled in the art.

[0036] Modified nucleotide sequences shall be understood to mean any nucleotide sequence obtained by mutagenesis according to techniques well known to a skilled person and exhibiting modifications in relation to the normal sequences, for example mutations in the regulatory and/or promoter sequences for the expression of a polypeptide, in particular leading to a modification of the level of expression of the said polypeptide or to a modulation of the replicative cycle. Modified nucleotide sequence will also be understood to mean any nucleotide sequence encoding a modified polypeptide as defined below.

[0037] During the study of the Bifidobacterium longum genome the following annotation could be performed as identified by sequences having an open reading frame as identified by NO. 1 to NO. 1147, shown in the table I below.

TABLE I

| | Gene | | | | | | BEST |
|---|---|---|---|---|---|---|---|
| | Name | START | STOP | STRAND | FUNCTION | BEST HIT | SCORE |
| NO. 1 | BL0002 | 833 | 2458 | + | chaperone (groEL) | trembl\|M17705\|MBBCG_1 | 0 |
| NO. 2 | BL0005 | 3719 | 4450 | + | response regulator of two- | trembl\|Z80226\|MTCY369_2 | 1.00E−72 |
| | | | | | component system | | |
| NO. 3 | BL0006 | 4622 | 6472 | + | histidine kinase sensor of two- | trembl\|280226\|MTCY369_3 | 1.00E−54 |
| | | | | | component system | | |
| NO. 4 | BL0007 | 6542 | 6931 | + | cold shock protein(cspA) | trembl\|AL022004\|MTV043_63 | 1.00E−25 |
| | BL0008 | 6940 | 8127 | + | narrowly conserved hypothetical | swiss\|Q10539\|Y877_MYCTU | 2.00E−37 |
| | | | | | protein with | | |
| NO. 6 | BL0010 | 9354 | 11963 | + | protease (clpC) | trembl\|AL049628\|SCE94_24 | 0 |
| NO. 7 | BL0011 | 12143 | 13462 | Complement | cytosine deaminase (EC 3.5.4.1) | pironly\|D83590\|D83590 | 5.00E−102 |
| | | | | | (cytosine | | |
| NO. 8 | BL0013 | 15297 | 16673 | + | proline/betaine transporter (proP) | trembl\|AL158057\|SC10G8_20 | 2.00E−85 |
| NO. 9 | BL0014 | 16759 | 17517 | + | creatinine amidohydrolase; | trembl\|AB007122\|AB007122_5 | 2.00E−60 |
| | | | | | creatininase (EC | | |
| NO. 10 | BL0015 | 17689 | 19482 | + | 5′-nucleotidase family protein | trembl\|AE001909\|AE001909_7 | 4.00E−24 |
| NO. 11 | BL0016 | 19688 | 21148 | complement | narrowly conserved hypothetical | trembl\|Z98209\|MTCY154_10 | 1.00E−49 |
| | | | | | protein with | | |
| NO. 12 | BL0017 | 21248 | 22648 | + | histidyl-trna synthetase (EC | pironly\|A82586\|A82586 | 4.00E−68 |
| | | | | | 6.1.1.21) | | |
| NO. 13 | BL0018 | 22684 | 24483 | + | aspartyl-trna synthetase (EC | swiss\|Q50649\|SYD_MYCTU | 0 |
| | | | | | 6.1.1.12) | | |
| NO. 14 | BL0021 | 26476 | 27291 | + | atp-binding protein of abc | trembl\|AL020958\|SC4H8_16 | 5.00E−102 |
| | | | | | transporter for | | |
| NO. 15 | BL0022 | 27362 | 28162 | + | glutamate-binding protein of abc | trembl\|AL020958\|SC4H8_15 | 5.00E−72 |
| | | | | | transporter | | |
| NO. 16 | BL0023 | 28162 | 28839 | + | permease protein of abc | trembl\|AL020958\|SC4H8_14 | 3.00E−52 |
| | | | | | transporter for | | |
| NO. 17 | BL0024 | 28845 | 29945 | + | permease protein of abc | trembl\|AL020958\|SC4H8_13 | 3.00E−44 |
| | | | | | transporter for | | |
| NO. 18 | BL0025 | 30034 | 31575 | + | hypothetical secreted protein with | trembl\|AL023496\|SC1A6_17 | 3.00E−50 |
| | | | | | probable acid | | |
| NO. 19 | BL0027 | 32653 | 33579 | + | narrowly conserved hypothetical | trembl\|AE001875\|AE001875_9 | 3.00E−47 |
| | | | | | protein with | | |
| NO. 20 | BL0028 | 33713 | 36280 | + | probable dead box-like helicase | tremblnew\|U42580\|PB42580_239 | 3.00E−46 |
| NO. 21 | BL0029 | 36363 | 37742 | + | widely conserved hypothetical | swiss\|Q50739\|YP59_MYCTU | 5.00E−118 |
| | | | | | protein with | | |
| NO. 22 | BL0030 | 37800 | 38522 | + | response regulator of two- | trembl\|U01971\|MT01971_1 | 5.00E−60 |
| | | | | | component system | | |
| NO. 23 | BL0031 | 38519 | 40216 | + | histidine kinase sensor of two- | trembl\|Z95121\|MTY20B11_20 | 2.00E−72 |
| | | | | | component system | | |
| NO. 24 | BL0033 | 42259 | 43242 | + | probable solute binding protein of | tremblnew\|AE005655\|AE005655_4 | 5.00E−33 |
| | | | | | abc | | |
| NO. 25 | BL0034 | 43383 | 44924 | + | atp binding protein of abc | tremblnew\|AE005655\|AE005655_5 | 5.00E−125 |
| | | | | | transporter | | |
| NO. 26 | BL0035 | 44926 | 45996 | + | probable abc transport system | swiss\|P39328\|YTFT_ECOLI | 6.00E−52 |
| | | | | | permease protein | | |
| NO. 27 | BL0036 | 45993 | 47015 | + | probable abc transporter permease | tremblnew\|AE005655\|AE005655_7 | 3.00E−44 |
| | | | | | protein for | | |
| NO. 28 | BL0037 | 47238 | 48695 | complement | probable efflux-type transporter | tremblnew\|AX066097\|AX066097_1 | 4.00E−52 |
| NO. 29 | BL0038 | 49084 | 49980 | + | conserved protein with | pironly\|B82343\|B82343 | 3.00E−30 |
| | | | | | hydroxyacid dehydrogenase | | |
| NO. 30 | BL0043 | 52518 | 54950 | complement | possible fused atp binding protein | trembl\|AE000829\|AE000829_9 | 3.00E−56 |
| | | | | | and permease | | |
| NO. 31 | BL0047 | 58071 | 58838 | + | similar to mycobacterium | trembl\|AE001936\|AE001936_11 | 7.00E−61 |
| | | | | | tuberculosis | | |
| NO. 32 | BL0048 | 59063 | 60322 | + | probable aminotransferase (EC | trembl\|AL031514\|SC2H4_4 | 5.00E−22 |
| | | | | | 2.6.1.—) | | |
| NO. 33 | BL0049 | 60331 | 61155 | + | atp binding protein of abc | trembl\|AE002076\|AE002076_5 | 3.00E−23 |
| | | | | | transporter | | |
| NO. 34 | BL0052 | 67189 | 69951 | + | dna ligase (EC 6.5.1.2) | swiss\|Q9Z585\|DNLJ_STRCO | 5.00E−141 |
| | | | | | (polydeoxyribonucleotide | | |
| NO. 35 | BL0053 | 70127 | 71242 | + | hypothetical protein with duf059 | swiss\|O33225\|MRP_MYCTU | 4.00E−85 |
| | | | | | and 4fe-4s iron | | |
| NO. 36 | BL0055 | 72964 | 73779 | + | sugar permease of abc | trembl\|AL138851\|SCE59_3 | 1.00E−45 |
| | | | | | transporter system | | |
| NO. 37 | BL0058 | 77028 | 77987 | + | possible butyryl-coa | trembl\|AE000948\|AE000948_16 | 3.00E−46 |
| | | | | | dehydrogenase | | |
| NO. 38 | BL0059 | 78166 | 79275 | + | narrowly conserved hypothetical | trembl\|AL117387\|SCF41_25 | 3.00E−43 |
| | | | | | protein with | | |
| NO. 39 | BL0062 | 80643 | 81185 | + | protein similar to ycbi of b. | trembl\|D50453\|BSD453_38 | 1.00E−24 |
| | | | | | subtilis | | |
| NO. 40 | BL0063 | 81212 | 82012 | complement | hypothetical transmembrane | swiss\|P74369\|YG47_SYNY3 | 2.00E−34 |
| | | | | | protein with unknown | | |
| NO. 41 | BL0064 | 82009 | 82797 | complement | atp binding protein of abc | pironly\|F82198\|F82198 | 6.00E−20 |
| | | | | | transporter | | |
| NO. 42 | BL0065 | 82902 | 83468 | + | elongation factor p (ef-p) (efp) | swiss\|P95019\|EFP_MYCTU | 5.00E−67 |
| NO. 43 | BL0066 | 83523 | 84095 | + | nusb antitermination protein | swissnew\|P95020\|NUSB_MYCTU | 7.00E−21 |
| | | | | | (nusB) | | |
| NO. 44 | BL0067 | 84286 | 85509 | + | carbamoyl-phosphate synthase | swissnew\|P71811\|CARA_{—} | 5.00E−120 |
| | | | | | small chain (EC | MYCTU | |
| NO. 45 | BL0068 | 85511 | 88894 | + | carbamoyl-phosphate synthase | trembl\|AE001016\|AE001016_6 | 0 |
| | | | | | large chain (EC | | |
| NO. 46 | BL0069 | 88894 | 89814 | + | orotidine 5′-phosphate | swiss\|P77898\|DCOP_MYCTU | 6.00E−40 |
| | | | | | decarboxylase (EC | | |
| NO. 47 | BL0070 | 89994 | 90584 | + | guanylate kinase (EC 2.7.4.8) | swiss\|P71659\|KGUA_MYCTU | 6.00E−44 |
| | | | | | (gmp kinase) | | |
| NO. 48 | BL0071 | 90586 | 91293 | complement | possible exonuclease (dnaQ) | swiss\|Q9ZHF6\|DPO3_THEMA | 4.00E−22 |
| NO. 49 | BL0072 | 91440 | 93695 | + | tetracycline resistance protein tetq | trembl\|Y08615\|BFTETAQ3_2 | 2.00E−63 |
| | | | | | (teta(q)1) | | |
| NO. 50 | BL0074 | 94496 | 95242 | + | permease protein of abc | trembl\|AE001537\|AE001537_3 | 5.00E−53 |
| | | | | | transporter system | | |
| NO. 51 | BL0075 | 95229 | 95903 | + | permease of abc transporter | trembl\|AL139075\|CJ11168X2_{—} | 1.00E−54 |
| | | | | | system for amino | 122 | |
| NO. 52 | BL0076 | 95896 | 96687 | + | atp binding protein of abc | trembl\|AE001537\|AE001537_5 | 8.00E−64 |
| | | | | | transporter for | | |
| NO. 53 | BL0077 | 96753 | 97655 | + | probable solute-binding protein | trembl\|AL139076\|CJ11168X3_{—} | 1.00E−71 |
| | | | | | for | 289 | |
| NO. 54 | BL0078 | 97891 | 99129 | + | cystathionine beta-lyase (beta- | trembl\|AF131880\|AF131880_1 | 5.00E−98 |
| | | | | | cystathionase ec | | |
| NO. 55 | BL0080 | 99771 | 101042 | complement | is30-type transposase | trembl\|AL021646\|MTV014_36 | 1.00E−78 |
| NO. 56 | BL0084 | 102563 | 103462 | + | narrowly conserved hypothetical | tremblnew\|AC008261\| | 7.00E−47 |
| | | | | | protein with | AC008261_3 | |
| NO. 57 | BL0086 | 104503 | 105297 | complement | glutamate racemase (EC 5.1.1.3) | pironly\|G83062\|G83062 | 2.00E−40 |
| | | | | | (nntrI) | | |
| NO. 58 | BL0087 | 105456 | 106298 | + | diaminopimelate epimerase (EC | swiss\|O69969\|DAPF_STRCO | 7.00E−30 |
| | | | | | 5.1.1.7) (dap | | |
| NO. 59 | BL0089 | 107179 | 108072 | + | conserved hypothetical protein | tremblnew\|AP001515\|AP001515_17 | 4.00E−32 |
| | | | | | with | | |
| NO. 60 | BL0092 | 110307 | 111881 | + | probable dna helicase ii (uvrD) | swiss\|O53344\|UVRD_MYCTU | 1.00E−84 |
| NO. 61 | BL0093 | 111951 | 113696 | complement | narrowly conserved hypothetical | trembl\|U00016\|ML016_32 | 1.00E−38 |
| | | | | | protein with | | |
| NO. 62 | BL0094 | 113917 | 114798 | + | hypothetical protein with unknown | trembl\|AL096852\|SCE19A_34 | 1.00E−42 |
| | | | | | function | | |
| NO. 63 | BL0097 | 117499 | 118689 | + | 1-deoxy-d-xylulose 5-phosphate | trembl\|Z74024\|MTCY274_1 | 4.00E−98 |
| | | | | | reductoisomerase | | |
| NO. 64 | BL0098 | 118698 | 119909 | + | protein with similarity to gcpe of | swissnew\|Q9X7W2\|GCPE_{—} | 5.00E−142 |
| | | | | | p. stuarti | STRCO | |
| NO. 65 | BL0100 | 121792 | 122511 | + | conserved hypothetical protein | trembl\|AL137166\|SCC121_13 | 8.00E−55 |
| | | | | | with unknown | | |
| NO. 66 | BL0101 | 122508 | 123302 | + | undecaprenyl pyrophosphate | swiss\|O05837\|UPPS_MYCTU | 4.00E−82 |
| | | | | | synthetase (EC | | |
| NO. 67 | BL0102 | 123458 | 124660 | complement | inosine-uridine preferring | trembl\|AE001900\|AE001900_5 | 5.00E−23 |
| | | | | | nucleoside hydrolase | | |
| NO. 68 | BL0103 | 124784 | 125854 | complement | possible solute binding protein of | trembl\|AE001726\|AE001726_3 | 6.00E−29 |
| | | | | | abc | | |
| NO. 69 | BL0104 | 126113 | 126895 | complement | possible permease protein of abc | trembl\|AE001726\|AE001726_4 | 2.00E−28 |
| | | | | | transporter | | |
| NO. 70 | BL0105 | 127091 | 128647 | complement | sucrose-6-phosphate hydrolase | swiss\|P40714\|CSCA_ECOLI | 2.00E−92 |
| | | | | | (EC 3.2.1.26) | | |
| NO. 71 | BL0106 | 128658 | 130160 | complement | sucrose transport protein (sucrose | tremblnew\|AE005467\| | 9.00E−93 |
| | | | | | permease) | AE005467_5 | |
| NO. 72 | BL0107 | 130210 | 131250 | complement | probable laci-type transcriptional | trembl\|AE001777\|AE001777_1 | 3.00E−31 |
| | | | | | regulator | | |
| NO. 73 | BL0108 | 131294 | 132691 | complement | hypothetical protein with | swissnew\|O35684\|NEUS_MOUSE | 5.00E−30 |
| | | | | | similarity to serine | | |
| NO. 74 | BL0111 | 133788 | 135167 | complement | hypothetical metabolite transport | swiss\|P38055\|YDJE_ECOLI | 2.00E−59 |
| | | | | | protein | | |
| NO. 75 | BL0113 | 136120 | 137121 | complement | phosphomethylpyrimidine kinase | swiss\|Q9ZBR6\|THID_STRCO | 6.00E−54 |
| | | | | | (EC 2.7.4.7) | | |
| NO. 76 | BL0114 | 137436 | 140189 | complement | thiamine biosynthesis protein | swiss\|P45740\|THIC_BACSU | 0 |
| | | | | | (thiE/thiC) | | |
| NO. 77 | BL0115 | 140272 | 141216 | complement | hydroxyethylthiazole kinase (EC | tremblnew\|AP001297\| | 2.00E−27 |
| | | | | | 2.7.1.50) | AP001297_22 | |
| NO. 78 | BL0116 | 141652 | 143124 | + | glycyl-trna synthetase (EC | swiss\|O65932\|SYG_MYCTU | 0 |
| | | | | | 6.1.1.14) | | |
| NO. 79 | BL0117 | 143269 | 144513 | + | possible nifr3-like protein | trembl\|AL133471\|SCC82_3 | 5.00E−100 |
| NO. 80 | BL0118 | 144625 | 145836 | + | cell division protein ftsz. (ftsZ) | trembl\|AF073487\|AF073487_1 | 5.00E−106 |
| NO. 81 | BL0119 | 145849 | 146328 | + | conserved hypothetical protein | tremblnew\|AL445403\|SC2I34_2 | 6.00E−22 |
| | | | | | with unknown | | |
| NO. 82 | BL0122 | 148326 | 148841 | + | possible lipoprotein signal | swiss\|Q10764\|LSPA_MYCTU | 5.00E−20 |
| | | | | | peptidase (EC | | |
| NO. 83 | BL0123 | 148841 | 149803 | + | widely conserved hypothetical | trembl\|AL109663\|SC4A10_6 | 6.00E−81 |
| | | | | | protein in the rlu | | |
| NO. 84 | BL0127 | 152161 | 155730 | + | dna polymerase iii alpha subunit | trembl\|AF108191\|AF108191_1 | 0 |
| | | | | | (dnaE) | | |
| NO. 85 | BL0128 | 155819 | 156253 | + | narrowly conserved hypothetical | swiss\|P76148\|YNEG_ECOLI | 7.00E−27 |
| | | | | | protein with | | |
| NO. 86 | BL0129 | 156459 | 158336 | + | narrowly conserved hypothetical | trembl\|U09352\|SP09352_2 | 5.00E−176 |
| | | | | | protein with | | |
| NO. 87 | BL0136 | 172074 | 173576 | complement | is21-type transposase | tremblnew\|AP001520\| | 4.00E−52 |
| | | | | | | AP001520_222 | |
| NO. 88 | BL0137 | 174295 | 176634 | complement | hypothetical protein with | swiss\|P49022\|PIP_LACLA | 5.00E−37 |
| | | | | | similarity to pip | | |
| NO. 89 | BL0138 | 176631 | 179369 | complement | hypothetical protein with | pironly\|A48653\|A48653 | 8.00E−41 |
| | | | | | similarity to pip | | |
| NO. 90 | BL0139 | 179875 | 180429 | complement | possible nadph-flavin | tremblnew\|AL446003\|SC5E9_29 | 2.00E−23 |
| | | | | | oxidoreductase (EC | | |
| NO. 91 | BL0140 | 181147 | 181794 | + | hypothetical protein in pgam | trembl\|AL132997\|SC9G1_8 | 3.00E−24 |
| | | | | | phosphoglycerate | | |
| NO. 92 | BL0141 | 182202 | 183530 | + | possible solute binding protein of | trembl\|M57692\|CTPULSA_3 | 3.00E−36 |
| | | | | | abc | | |
| NO. 93 | BL0142 | 183788 | 184804 | complement | laci-type transcriptional regulator | trembl\|AL136502\|SCF43_17 | 2.00E−30 |
| NO. 94 | BL0143 | 185085 | 186041 | + | permease of abc transporter | swiss\|P37730\|AMYD_THETU | 2.00E−61 |
| | | | | | possibly for | | |
| NO. 95 | BL0144 | 186041 | 186883 | + | permease of abc transporter | swiss\|P37729\|AMYC_THETU | 4.00E−50 |
| | | | | | possibly for | | |
| NO. 96 | BL0146 | 187886 | 190762 | + | possible arabinosidase | trembl\|U55187\|BF55187_1 | 1.00E−47 |
| NO. 97 | BL0148 | 191209 | 192390 | complement | possible transposase | trembl\|M86608\|ISAFATPS_1 | 2.00E−54 |
| NO. 98 | BL0149 | 192651 | 194153 | + | is21-type transposase (istA) | tremblnew\|AP001520\| | 3.00E−53 |
| | | | | | | AP001520_222 | |
| NO. 99 | BL0150 | 194234 | 194935 | + | istb-like protein (istB) | tremblnew\|AJ414141\| | 1.00E−32 |
| | | | | | | AJ414141_30 | |
| NO. 100 | BL0151 | 195265 | 196677 | + | narrowly conserved hypothetical | trembl\|AP000004\|AP000004_109 | 5.00E−76 |
| | | | | | protein with | | |
| NO. 101 | BL0152 | 196740 | 198215 | complement | aromatic amino acid transport | tremblnew\|AE005187\| | 5.00E−120 |
| | | | | | protein arop | AE005187_9 | |
| NO. 102 | BL0153 | 198437 | 199006 | complement | probable tetr-like transcriptional | tremblnew\|AP001509\| | 3.00E−23 |
| | | | | | regulator | AP001509_157 | |
| NO. 103 | BL0154 | 199150 | 199851 | + | atp binding protein of abc | trembl\|AE000977\|AE000977_7 | 8.00E−61 |
| | | | | | transporter | | |
| NO. 104 | BL0156 | 203874 | 205400 | + | amino acid permease (aapA) | swiss\|O06005\|AAPA_BACSU | 6.00E−98 |
| NO. 105 | BL0157 | 205842 | 210560 | + | narrowly conserved hypothetical | trembl\|AL158061\|SC6D11_2 | 2.00E−87 |
| | | | | | protein with | | |
| NO. 106 | BL0158 | 210772 | 214608 | + | very narrowly conserved | trembl\|AL132965\|ATT16K5_23 | 3.00E−37 |
| | | | | | hypothetical protein | | |
| NO. 107 | BL0159 | 215104 | 215667 | complement | dna-damage-inducible protein of | tremblnew\|AE005591\| | 1.00E−26 |
| | | | | | escherichia coli | AE005591_13 | |
| NO. 108 | BL0162 | 216811 | 218682 | + | probable permease protein of abc | trembl\|AL137187\|SC7A8_2 | 5.00E−112 |
| | | | | | transporter | | |
| NO. 109 | BL0163 | 218897 | 220726 | + | probable permease protein of abc | trembl\|AL137187\|SC7A8_3 | 5.00E−142 |
| | | | | | transporter | | |
| NO. 110 | BL0166 | 223918 | 225015 | + | conserved hypothetical protein | trembl\|AL132674\|SCE87_4 | 7.00E−64 |
| | | | | | with tetrapyrole | | |
| NO. 111 | BL0170 | 226374 | 228239 | + | methionyl-trna synthetase (EC | swiss\|O58721\|SYM_PYRHO | 5.00E−113 |
| | | | | | 6.1.1.10) | | |
| NO. 112 | BL0173 | 230531 | 232057 | complement | aminopeptidase c (EC 3.4.22.—) | swiss\|Q56115\|PEPC_STRTR | 4.00E−87 |
| | | | | | (pepC) | | |
| NO. 113 | BL0174 | 232282 | 234510 | + | narrowly conserved hypothetical | tremblnew\|AE005584\| | 5.00E−163 |
| | | | | | protein with | AE005584_8 | |
| NO. 114 | BL0175 | 234514 | 235503 | + | probable arac/xyls-type | tremblnew\|AE005584\| | 5.00E−20 |
| | | | | | transcriptional | AE005584_6 | |
| NO. 115 | BL0176 | 235675 | 236832 | complement | probable laci-type transcriptional | trembl\|AE001777\|AE001777_1 | 3.00E−31 |
| | | | | | regulator | | |
| NO. 116 | BL0177 | 237206 | 238615 | + | possible alpha-galactosidase ec | tremblnew\|AP001513\| | 1.00E−95 |
| | | | | | 3.2.1.22 | AP001513_143 | |
| NO. 117 | BL0179 | 239416 | 241278 | + | probable permease protein of abc | tremblnew\|AP001511\| | 5.00E−105 |
| | | | | | transporter | AP001511_14 | |
| NO. 118 | BL0180 | 241289 | 243097 | + | probable permease protein of abc | trembl\|U50951\|TT50951_4 | 5.00E−151 |
| | | | | | transporter | | |
| NO. 119 | BL0181 | 243354 | 245825 | + | alpha-1-arabinofuranosidase a (EC | trembl\|AL031541\|SCI35_5 | 5.00E−108 |
| | | | | | 3.2.1.55) | | |
| NO. 120 | BL0182 | 246175 | 247920 | complement | possible endo-1,5-alpha-1- | swiss\|P42293\|YXIA_BACSU | 3.00E−44 |
| | | | | | arabinosidase | | |
| NO. 121 | BL0183 | 248077 | 249672 | complement | possible endo-1,5-alpha-1- | swiss\|P42293\|YXIA_BACSU | 6.00E−62 |
| | | | | | arabinosidase | | |
| NO. 122 | BL0185 | 252035 | 253093 | + | laci-type transcriptional regulator | trembl\|AE001777\|AE001777_1 | 1.00E−39 |
| NO. 123 | BL0187 | 254391 | 255449 | + | exo-alpha-1-arabinofuranosidase ii | tremblnew\|AP001513\| | 5.00E−108 |
| | | | | | | AP001513_140 | |
| NO. 124 | BL0189 | 257322 | 258275 | + | sugar permease of abc transporter | trembl\|D90905\|SSD905_101 | 2.00E−50 |
| | | | | | system | | |
| NO. 125 | BL0190 | 258272 | 259198 | + | sugar permease of abc | trembl\|D90910\|SSD910_40 | 2.00E−48 |
| | | | | | transporter system | | |
| NO. 126 | BL0193 | 261151 | 262110 | + | widely conserved hypothetical | trembl\|AL132674\|SCE87_2 | 2.00E−57 |
| | | | | | protein with | | |
| NO. 127 | BL0194 | 262543 | 264753 | + | kup system potassium uptake | pironly\|F82623\|F82623 | 2.00E−88 |
| | | | | | protein (kup2) | | |
| NO. 128 | BL0203 | 275203 | 276966 | + | hypothetical protein involved in | trembl\|AB010970\|AB010970_8 | 2.00E−67 |
| | | | | | polysaccharide | | |
| NO. 129 | BL0205 | 278236 | 279192 | complement | possible glycosyltransferase | trembl\|AF033015\|AF033015_6 | 3.00E−88 |
| NO. 130 | BL0207 | 280941 | 282224 | complement | protein possibly involved in atp- | trembl\|AB010970\|AB010970_5 | 5.00E−102 |
| | | | | | driven | | |
| NO. 131 | BL0208 | 282226 | 283050 | complement | possible permease protein of abc | trembl\|AB010970\|AB010970_4 | 2.00E−56 |
| | | | | | transporter | | |
| NO. 132 | BL0210 | 284428 | 284820 | + | probable glycerol-3-phosphate | swissnew\|P27623\|TAGD_BACSU | 1.00E−44 |
| NO. 133 | BL0213 | 286135 | 288033 | complement | narrowly conserved hypothetical | trembl\|AL022076\|MTV026_12 | 5.00E−21 |
| | | | | | protein with | | |
| NO. 134 | BL0215 | 288832 | 289788 | + | possible glycosyltransferase | trembl\|AF033015\|AF033015_6 | 2.00E−88 |
| NO. 135 | BL0216 | 289799 | 291796 | + | narrowly conserved hypothetical | tremb1\|AL022076\|MTV026_12 | 2.00E−95 |
| | | | | | protein with | | |
| NO. 136 | BL0217 | 291894 | 293834 | complement | narrowly conserved hypothetical | trembl\|AL022076\|MTV026_12 | 4.00E−95 |
| | | | | | protein with | | |
| NO. 137 | BL0218 | 294189 | 294818 | complement | fragment of a. mutans orf7 | trembl\|AB010970\|AB010970_8 | 3.00E−22 |
| NO. 138 | BL0219 | 294976 | 295965 | + | probable transposase | trembl\|U66426\|TFU66426_1 | 1.00E−56 |
| NO. 139 | BL0220 | 295985 | 296746 | complement | istb-like protein (istB) | trembl\|AB024946\|AB024946_78 | 7.00E-37 |
| NO. 140 | BL0221 | 297207 | 298226 | complement | defective is21-type transposase | tremblnew\|AP001520\| | 6.00E−57 |
| | | | | | | AP001520_222 | |
| NO. 141 | BL0222 | 298311 | 300041 | complement | defective transposase | tremblnew\|AP001520\| | 9.00E−30 |
| | | | | | | AP001520_222 | |
| NO. 142 | BL0223 | 300095 | 300688 | complement | possible transposase | trembl\|AF029727\|AF029727_1 | 2.00E−28 |
| NO. 143 | BL0224 | 300691 | 300966 | complement | hypothetical protein with | tremblnew\|AP001508\| | 4.00E−20 |
| | | | | | similarity to orfe of | AP001508_57 | |
| NO. 144 | BL0227 | 303180 | 304085 | complement | glucose-1-phosphate | trembl\|AB030032\|AB030032_7 | 5.00E−108 |
| | | | | | thymidylyltransferase (EC | | |
| NO. 145 | BL0228 | 304176 | 305618 | complement | possible fused dtdp-4-keto-I- | trembl\|D78182\|MD182_5 | 9.00E−58 |
| | | | | | rhamnose reductase | | |
| NO. 146 | BL0229 | 305632 | 306675 | complement | dtdp-glucose 4,6-dehydratase (EC | trembl\|AF105113\|AF105113_5 | 5.00E−140 |
| | | | | | 4.2.1.46) | | |
| NO. 147 | BL0230 | 306818 | 308257 | complement | hypothetical transmembrane | trembl\|A76918\|A76918_12 | 7.00E−62 |
| | | | | | protein possibly | | |
| NO. 148 | BL0231 | 308379 | 310124 | complement | possible decarboxlyase with tpp | swiss\|P23970\|MEND_BACSU | 5.00E−24 |
| | | | | | domain + d236 | | |
| NO. 149 | BL0232 | 310151 | 310891 | complement | probable 3-oxoacyl-[acyl-carrier | swiss\|O67610\|FABG_AQUAE | 8.00E−30 |
| | | | | | protein] | | |
| NO. 150 | BL0235 | 313510 | 314451 | complement | probable glycosyltransferase | trembl\|AF026471\|AF026471_9 | 5.00E−105 |
| | | | | | (cps2F or dexB) | | |
| NO. 151 | BL0236 | 314467 | 315660 | complement | possible rhamnosyltransferase | tremblnew\|Y17900\|SSA17900_7 | 5.00E−139 |
| | | | | | (cpsF) | | |
| NO. 152 | BL0237 | 315718 | 317262 | complement | galactosyl transferase cpsd (EC | trembl\|AL121855\|SCF62_7 | 2.00E−49 |
| | | | | | 2.7.8.—) | | |
| NO. 153 | BL0239 | 317776 | 318978 | + | probable integrase/recombinase | swissnew\|P55639\|Y4RF_RHISN | 3.00E−20 |
| | | | | | (sss or xerC) | | |
| NO. 154 | BL0242 | 321079 | 321879 | complement | possible transposase | trembl\|AL021246\|MTV008_34 | 3.00E−28 |
| NO. 155 | BL0247 | 325735 | 326226 | complement | possible transposase or integrase | trembl\|U50076\|SL50076_2 | 8.00E−24 |
| NO. 156 | BL0249 | 327639 | 329360 | + | undecaprenyl-phosphate sugar | trembl\|AL121855\|SCF62_7 | 4.00E−59 |
| | | | | | phosphotransferase | | |
| NO. 157 | BL0251 | 331665 | 333182 | + | widely conserved hypothetical | tremblnew\|AF188518\|AF188518_1 | 3.00E−76 |
| | | | | | transport protein | | |
| NO. 158 | BL0252 | 333282 | 334649 | complement | h(+)-stimulated manganese uptake | swissnew\|O05916\|MNTH_MYCTU | 5.00E−109 |
| | | | | | system protein | | |
| NO. 159 | BL0254 | 336313 | 336996 | complement | narrowly conserved hypothetical | trembl\|Z83018\|MTCY349_23 | 7.00E−34 |
| | | | | | protein with | | |
| NO. 160 | BL0255 | 337060 | 337929 | complement | dehydrogenase or reductase | trembl\|AL034443\|SC4B5_1 | 4.00E−68 |
| | | | | | protein | | |
| NO. 161 | BL0257 | 338565 | 341258 | complement | possible arabinogalactan endo- | tremblnew\|AP001514\|AP001514_29 | 5.00E−143 |
| | | | | | beta-galactosidase | | |
| NO. 162 | BL0258 | 341454 | 342509 | complement | laci-type transcriptional regulator | trembl\|AE001777\|AE001777_1 | 2.00E−28 |
| NO. 163 | BL0259 | 342553 | 344826 | complement | beta-galactosidase i(EC 3.2.1.23) | trembl\|AL158061\|SC6D11_3 | 5.00E−171 |
| | | | | | (lactase) | | |
| NO. 164 | BL0260 | 344872 | 345879 | complement | sugar transport system permease | trembl\|AL158061\|SC6D11_5 | 5.00E−113 |
| | | | | | protein | | |
| NO. 165 | BL0261 | 345882 | 346844 | complement | sugar transport system permease | trembl\|AL158061\|SC6D11_6 | 5.00E−100 |
| | | | | | protein | | |
| NO. 166 | BL0262 | 347063 | 348412 | complement | solute binding protein of abc | Trembl\|AL158061\|SC6D11_4 | 1.00E−90 |
| | | | | | transporter | | |
| NO. 167 | BL0263 | 349108 | 349518 | + | fragment of arabinose permease | trenml\|Z99121\|BSUB0018_82 | 1.00E−23 |
| NO. 168 | BL0264 | 349792 | 353853 | complement | atp binding protein of abc | swiss\|P71355\|Y663_HAEIN | 5.00E−105 |
| | | | | | transporter | | |
| NO. 169 | DL0266 | 354798 | 356621 | + | probable long-chain-fatty acid coa | treml\|AL049497\|SC6G10_4 | 5.00E−130 |
| | | | | | ligase | | |
| NO. 170 | BL0267 | 356803 | 357438 | complement | atp binding protein of abc | trembl\|AF140784\|AP140784_2 | 7.00E−61 |
| | | | | | transporter similar | | |
| NO. 171 | BL0268 | 357451 | 358674 | complement | atp binding protein of abc | trembl\|AF140784\|AF140784_1 | 4.00E−35 |
| | | | | | transporter similar | | |
| NO. 172 | BL0269 | 358671 | 360038 | complement | abc-type transporter similar to | trembl\|AF140784\|AF140784_3 | 5.00E−67 |
| | | | | | vex3 (vexp3) of | | |
| NO. 173 | BL0271 | 362037 | 362753 | + | possible amidotransferase subunit | trembl\|AL031541\|SC135_37 | 4.00E−26 |
| NO. 174 | BL0272 | 362937 | 364454 | complement | 1-arabionse isomerase (EC | trembl\|AB036736\|AB036736_2 | 5.00E−135 |
| | | | | | 5.3.1.4) (araA) | | |
| NO. 175 | BL0273 | 364686 | 365378 | complement | 1-ribulose-5-phosphate 4- | gp\|AB038527\|7242885 | 4.00E−75 |
| | | | | | epimerase (EC 5.1.3.4) | | |
| NO. 176 | BL0274 | 365463 | 367109 | complement | probable sugar kinase | trembl\|AJ249910\|PSP249910_1 | 2.00E−22 |
| NO. 177 | BL0275 | 367264 | 368418 | complement | laci-type transcriptional regulator | trembl\|AL158061\|SC6D11_7 | 6.00E−43 |
| NO. 178 | BL0276 | 368506 | 369345 | complement | probable ribonuclease hii (EC | swissnew\|O69989\|RNH2_STRCO | 2.00E−30 |
| | | | | | 3.1.26.4) (mase | | |
| NO. 179 | BL0277 | 369465 | 370322 | complement | probable signal peptidase i (EC | trembl\|AL023797\|SC2E1_15 | 2.00E−33 |
| | | | | | 3.4.21.89) | | |
| NO. 180 | BL0279 | 371486 | 373186 | complement | glucose-6-phosphate isomerase | swiss\|P77895\|G6PI_MYCTU | 0 |
| | | | | | (gpi) (EC 5.3.1.9) | | |
| NO. 181 | BL0282 | 374992 | 376272 | complement | femab-like protein possibly | trembl\|U50357\|SZU50357_1 | 5.00E−45 |
| | | | | | involved in | | |
| NO. 182 | BL0283 | 376322 | 377632 | complement | femab-like protein possibly | trembl\|U66883\|SSU66883_4 | 5.00E−41 |
| | | | | | involved in | | |
| NO. 183 | BL0284 | 377706 | 378974 | complement | femab-like protein possibly | trembl\|U50357\|SZU50357_1 | 9.00E−53 |
| | | | | | involved in | | |
| NO. 184 | BL0285 | 379421 | 380179 | complement | widely conserved by hypothetical | trembl\|AL096852\|SCE19A_2 | 1.00E−46 |
| | | | | | protein in haml | | |
| NO. 185 | BL0286 | 380223 | 380999 | complement | probable ribonuclease ph (EC | trembl\|AL096852\|SCE19A_4 | 7.00E−82 |
| | | | | | 2.7.7.56) (mass | | |
| NO. 186 | BL0287 | 381282 | 382640 | complement | conserved hypothetical protein | trembl\|AL096852\|SCE19A_7 | 5.00E−128 |
| | | | | | with unknown | | |
| NO. 187 | BL0290 | 384147 | 385157 | + | possible reductase | trembl\|U60828\|LLU60828_1 | 5.00E−104 |
| NO. 188 | BL0291 | 385766 | 386266 | + | phosphopantetheine | swiss\|Q9ZBR1\|COAD_STRCO | 2.00E−35 |
| | | | | | adenylyltransferase (EC | | |
| NO. 189 | BL0293 | 387403 | 387882 | + | conserved hypothetical protein | trembl\|AL034447\|SC7A1_14 | 2.00E−25 |
| | | | | | with duf177 | | |
| NO. 190 | BL0295 | 388208 | 389041 | + | ribonuclease iii (EC 3.1.26.3) | swiss\|O69469\|RNC_MYCLE | 2.00E−47 |
| | | | | | (mase iii) | | |
| NO. 191 | BL0296 | 389202 | 391169 | + | acetolactate synthase (EC | trembl\|AL035569\|SC8D9_24 | 0 |
| | | | | | 4.1.3.18) | | |
| NO. 192 | BL0297 | 391186 | 391740 | + | acetolactate synthase small | trembl\|AF175526\|AF175526_1 | 6.00E−52 |
| | | | | | subunit (EC | | |
| NO. 193 | BL0298 | 392184 | 392603 | + | plasmid stability protein stbb | pironly\|H82660\|H82660 | 1.00E−20 |
| | | | | | (stbB) | | |
| NO. 194 | BL0299 | 392656 | 394932 | complement | atp binding protein of abc | trembl\|AL022002\|MTV047_2 | 2.00E−95 |
| | | | | | transporter | | |
| NO. 195 | BL0300 | 394980 | 395870 | complement | possible amidotransferase | trembl\|D64006\|SSSLLLH_57 | 5.00E−25 |
| NO. 196 | BL0301 | 395927 | 397567 | + | cysteinyl-trna synthetase 1 (EC | gp\|AL160331\|7242756 | 5.00E−115 |
| | | | | | 6.1.1.16) | | |
| NO. 197 | BL0303 | 398703 | 400451 | + | signal recognition particle protein | trembl\|AL023797\|SC2E1_3 | 5.00E−170 |
| | | | | | (ffh) | | |
| NO. 198 | BL0305 | 401870 | 402331 | + | 30s ribosomal protein s16 (rpsP) | swiss\|Q10795\|RS16_MYCTU | 1.00E−28 |
| NO. 199 | BL0307 | 402608 | 403231 | + | possible rim-like protein involved | trembl\|AL023797\|SC2E1_10 | 6.00E−22 |
| | | | | | in efficient | | |
| NO. 200 | BL0308 | 403354 | 404406 | complement | inosine-uridine preferring | trembl\|AE001900\|AE001900_5 | 2.00E−40 |
| | | | | | nucleoside hydrolase | | |
| NO. 201 | BL0309 | 404504 | 405367 | complement | possible oxidoreductase of the | trembl\|AE002028\|AE002028_7 | 2.00E−32 |
| | | | | | aldo/keto | | |
| NO. 202 | BL0311 | 407767 | 408345 | complement | lema-like protein (lemA) | trembl\|U66186\|LMU66186_1 | 3.00E−39 |
| NO. 203 | BL0312 | 408640 | 409419 | complement | probable atp-binding protein of | gp\|AL353816\|7636012 | 5.00E−101 |
| | | | | | abc transporter | | |
| NO. 204 | BL0313 | 409472 | 410437 | complement | probable phosphate binding- | gp\|AL353816\|7636013 | 2.00E−67 |
| | | | | | protein of abc | | |
| NO. 205 | BL0314 | 410470 | 411423 | complement | probable phosphate permease | gp\|AL353816\|7636014 | 1.00E−75 |
| | | | | | protein of abc | | |
| NO. 206 | BL0315 | 411634 | 412767 | complement | phosphate-binding transport | gp\|AL353816\|7636015 | 4.00E−64 |
| | | | | | protein of abc | | |
| NO. 207 | BL0316 | 413007 | 413777 | complement | response regulator of two- | tremblnew\|AF123314\|AF123314_2 | 2.00E−77 |
| | | | | | component system | | |
| NO. 208 | BL0317 | 413910 | 415241 | complement | histidine kinase sensor of two- | gp\|AL160331\|7242750 | 7.00E−64 |
| | | | | | component system | | |
| NO. 209 | BL0318 | 415492 | 416205 | complement | probable mta/sah nucleosidase | tremblnew\|AP001518\|AP001518_69 | 2.00E−29 |
| | | | | | [includes: | | |
| NO. 210 | BL0319 | 416327 | 417559 | complement | phospho-2-keto-3-deoxybeptonate | swiss\|P00886\|AROG_ECOLI | 4.00E−97 |
| | | | | | aldolase (dahp | | |
| NO. 211 | BL0320 | 417688 | 418821 | complement | phospho-2-debydro-3- | pironly\|H82856\|H82856 | 5.00E−101 |
| | | | | | deoxyheptonate aldolase, | | |
| NO. 212 | BL0321 | 419113 | 420456 | complement | aminopeptidase c (EC 3.4.22.—) | swiss\|Q48543\|PEPC_LACDL | 3.00E−88 |
| | | | | | (pepC) | | |
| NO. 213 | BL0323 | 422296 | 422973 | complement | pyrrolidone−carboxylate peptidase | swiss\|P28618\|PCP_BACSU | 4.00E−26 |
| | | | | | (EC 3.4.19.3) | | |
| NO. 214 | BL0324 | 422983 | 423858 | complement | probable | trembl\|Z37516\|HIACAPIID_1 | 1.00E−31 |
| NO. 215 | BL0325 | 423938 | 424918 | complement | conserved hypothetical protein | swissnew\|P45497\|YFTZ_STRCO | 2.00E−33 |
| | | | | | with unknown | | |
| NO. 216 | BL0326 | 424996 | 426717 | complement | possible protease or peptidase | tremblnew\|AP001511\|AP001511_{—} | 2.00E−65 |
| | | | | | | 163 | |
| NO. 217 | BL0327 | 426776 | 427531 | + | trna (guasine-nl)- | swiss\|O69882\|TRMD_STRCO | 5.00E−60 |
| | | | | | methyltransferase (EC | | |
| NO. 218 | BL0328 | 427555 | 428175 | complement | hypothetical protein with possible | trembl\|Z83018\|MTCY349_17 | 1.00E−26 |
| | | | | | methylase | | |
| NO. 219 | BL0329 | 428393 | 431236 | complement | atp-dependent dna helicase (EC | trembl\|AL034447\|SC7A1_10 | 5.00E−104 |
| | | | | | 3.6.1.—). | | |
| NO. 220 | BL0332 | 433138 | 434415 | + | narrowly conserved hypothetical | swiss\|P42306\|YXIO_BACSU | 2.00E−93 |
| | | | | | protein with | | |
| NO. 221 | BL0335 | 435958 | 436491 | + | methylated-dna-protein-cysteine | trembl\|AL034446\|SC1A9_15 | 4.00E−24 |
| NO. 222 | BL0338 | 439120 | 440592 | + | aspartate ammonia-lyase (EC | tremblnew\|AE008304\|AE008304_2 | 1.00E−123 |
| | | | | | 4.3.1.1) (aspartase) | | |
| NO. 223 | BL0341 | 442847 | 444124 | complement | atp binding protein of abc | trembl\|ALO31225\|SC8B7_10 | 6.00E−66 |
| | | | | | transporter (msiK) | | |
| NO. 224 | BL0343 | 444980 | 445930 | complement | possible permease protein of abc | trembl\|AL139076\|CJ11168X3_S9 | 7.00E−33 |
| | | | | | transporter | | |
| NO. 225 | BL0344 | 445942 | 447108 | complement | possible solute binding protein of | pironly\|D83240\|D83240 | 2.00E−44 |
| | | | | | abc | | |
| NO. 226 | BL0345 | 447361 | 448647 | complement | d-alanine-d-alanine ligase (EC | swiss\|P95114\|DDL_MYCTU | 2.00E−76 |
| | | | | | 6.3.2.4) | | |
| NO. 227 | BL0346 | 448735 | 449736 | complement | glycerol-3-phosphate | trembl\|AL034447\|SC7A1_3 | 5.00E−79 |
| | | | | | dehydrogenase [nad(p)+] (EC | | |
| NO. 228 | BL0348 | 430878 | 451267 | complement | hypothetical 14.5 kda translational | swiss\|O58584\|Y854_PYRHO | 7.00E−25 |
| | | | | | inhibitor | | |
| NO. 229 | BL0350 | 452516 | 453526 | complement | hypothetical protein with marginal | trembl\|AL137242\|SC8F4_23 | 8.00E−33 |
| | | | | | similarity to | | |
| NO. 230 | BL0354 | 455906 | 456895 | + | possible secreted peplidyl-prolyl | trembl\|AL132648\|SCI41_22 | 5.00E−25 |
| | | | | | cia-trans is | | |
| NO. 231 | BL0355 | 456941 | 457750 | complement | narrowly conserved hypothetical | swiss\|Q10634\|YD21_MYCTU | 1.00E−60 |
| | | | | | protein with | | |
| NO. 232 | BL0357 | 458092 | 459564 | complement | atp synthase beta chain (EC | trembl\|Z22606\|SLATPSYNA_8 | 0 |
| | | | | | 3.6.1.34) (atpD) | | |
| NO. 233 | BL0358 | 459573 | 460496 | complement | atp synthase gamma chain (EC | trembl\|Z22606\|SLATPSYNA_7 | 1.00E−60 |
| | | | | | 3.6.1.34) (atpG) | | |
| NO. 234 | BL0359 | 460500 | 462131 | complement | atp synthase alpha chain (EC | trembl\|Z22606\|SLATPSYNA_6 | 0 |
| | | | | | 3.6.1.34) (atpA) | | |
| NO. 235 | BL0360 | 462207 | 463043 | complement | atp synthase delta chain (EC | swissnew\|Q10594\|ATPD_MYCTU | 2.00E−21 |
| | | | | | 3.6.1.34) (atpH) | | |
| NO. 236 | BL0363 | 463984 | 464796 | complement | atp synthase a chain (EC 3.6.1.34) | swiss\|P50012\|ATP6_STRLI | 9.00E−28 |
| | | | | | (atpB) | | |
| NO. 237 | BL0365 | 465258 | 466292 | complement | homoserine o-succinyltransferase | swissnew\|Q9KAK7\|META_BACHD | 2.00E−88 |
| | | | | | (EC 2.3.1.46) | | |
| NO. 238 | BL0375 | 472472 | 473593 | + | hypothetical protein with | trembl\|AJ006589\|BPH6589_4 | 3.00E−25 |
| | | | | | similarity to gp 34 | | |
| NO. 239 | BL0381 | 477134 | 479185 | + | phage related protein: putative | trembl\|AF011378\|AF011378_14 | 1.00E−34 |
| | | | | | minor tail | | |
| NO. 240 | BL0386 | 483079 | 483909 | complement | probable phage-family | trembl\|Z80225\|MTCY441_16 | 2.00E−47 |
| | | | | | integrase/recombinase | | |
| NO. 241 | BL0388 | 486597 | 488837 | + | possible glycanase or glycogenase | trembl\|AL138978\|SC6A11_19 | 5.00E−174 |
| | | | | | with amylase | | |
| NO. 242 | BL0389 | 489065 | 489559 | + | inorganic pysophosphatase (EC | swiss\|Q9X8I9\|IPYR_STRCO | 6.00E−51 |
| | | | | | 3.6.1.1) | | |
| NO. 243 | BL0390 | 489793 | 490377 | + | integral membrane protein in the | trembl\|AL139074\|CJ11168X1_155 | 2.00E−36 |
| | | | | | upf0059 | | |
| NO. 244 | BL0392 | 491351 | 492151 | + | possible transcriptional requlatory | swissnew\|Q05943\|GLNR_STRCO | 7.00E−69 |
| | | | | | protein with | | |
| NO. 245 | BL0393 | 492210 | 492896 | + | endonuclease iii (EC 4.2.99.18) | swiss\|O69642\|END3_MYCTU | 7.00E−58 |
| | | | | | (dna-(apurinic | | |
| NO. 246 | BL0395 | 494523 | 497363 | + | valyl-trna synthetase (EC 6.1.1.9) | Swiss\|Q9ZCN6\|SYV_RICPR | 5.00E−155 |
| | | | | | (valine-trna | | |
| NO. 247 | BL0398 | 500447 | 502516 | complement | transcription termination factor | trembi\|L27277\|MLRHO_1 | 5.00E−151 |
| | | | | | rho (rho) | | |
| NO. 248 | BL0399 | 502722 | 504335 | complement | hypothetical protein with pyridine | trembl\|AP000002\|AP000002_120 | 1.00E−29 |
| NO. 249 | BL0400a | 506584 | 507286 | + | narrowly conserved hypothetical | trembl\|Z97369\|MLCB250_15 | 2.00E−34 |
| | | | | | protein with | | |
| NO. 250 | BL0402 | 508266 | 509765 | complement | glutamyl-trna(gln) | swiss\|Q9Z578\|GATB_STRCO | 5.00E−176 |
| | | | | | amidotransferase subunit b | | |
| NO. 251 | BL0403 | 509791 | 511332 | complement | glutamyl-trna(gln) | swiss\|Q9Z580\|GATA_STRCO | 5.00E−164 |
| | | | | | amidotransferase subunit a | | |
| NO. 252 | BL0405 | 511802 | 512650 | complement | narrowly conserved hypothetical | trembl\|AL021931\|MTV036_15 | 6.00E−46 |
| | | | | | protein with | | |
| NO. 253 | BL0407 | 513370 | 514773 | complement | conserved hypothetical protein | trembl\|AF213822\|AF213822_7 | 2.00E−53 |
| | | | | | withduf195 | | |
| NO. 254 | BL0408 | 514837 | 515118 | complement | narrowly conserved hypothetical | trembl\|Z97050\|MTC128_29 | 1.00E−28 |
| | | | | | protein with | | |
| NO. 255 | BL0409 | 515230 | 517938 | + | copper-transporting atpase (EC | trembl\|AF067954\|AF067954_9 | 5.00E−76 |
| | | | | | 3.6.1.36) (silP) | | |
| NO. 256 | BL0410 | 518022 | 518756 | complement | glycerol uptake facilitator-like | swiss\|Q9X1E3\|GLPF_THEMA | 2.00E−61 |
| | | | | | protein in mip | | |
| NO. 257 | BL0411 | 518990 | 520669 | complement | phosphoenolpyruvate-protein | tremblnew\|AP001517\|AP001517_{—} | 5.00E−133 |
| | | | | | phosphotransferase | 195 | |
| NO. 258 | BL0413 | 521316 | 521762 | complement | 50s ribosomal protein19 (rpll) | swiss\|Q9X8U5\|RL9_STRCO | 1.00E−21 |
| NO. 259 | BL0414 | 521782 | 522030 | complement | 30s ribosomal protein s18-2 | swiss\|Q9X8K4\|R18B_STRCO | 3.00E−21 |
| | | | | | (rpsR) | | |
| NO. 260 | BL0415 | 522091 | 522747 | complement | single-strand binding protein(ssb) | swiss\|P71711\|SSB_MYCTU | 4.00E−38 |
| NO. 261 | BL0416 | 522804 | 523097 | complement | 30s ribosomal protein s6. (rpsF) | swiss\|P71710\|RS6_MYCTU | 1.00E−21 |
| NO. 262 | BL0418 | 523863 | 524876 | + | ribose-phosphate | trembl\|Z92539\|MTCY10G2_4 | 5.00E−103 |
| | | | | | pyrophosphokinase (EC 2.7.6.1) | | |
| NO. 263 | BL0419 | 524952 | 525836 | complement | hypothetical protein in upf0001 | pironly\|H82646\|H82646 | 7.00E−30 |
| NO. 264 | BL0420 | 525916 | 529632 | complement | probable extracellular protein | trembl\|Z99113\|BSUB0010_109 | 1.00E−24 |
| | | | | | possibly involved | | |
| NO. 265 | BL0421 | 529737 | 535562 | complement | narrowly conserved hypothetical | trembl\|AJ223998\|AOPCZA361_25 | 0 |
| | | | | | protein possibly | | |
| NO. 266 | BL0422 | 536261 | 538231 | complement | narrowly conserved hypothetical | tremblnew\|AE005584\|AE005584_8 | 5.00E−133 |
| | | | | | protein with | | |
| NO. 267 | BL0423 | 538240 | 539058 | complement | sugar permease of abc transporter | trembl\|AJ223998\|AOPCZA361_25 | 1.00E−38 |
| | | | | | system | | |
| NO. 268 | BL0424 | 539079 | 540005 | complement | sugar permease of abc transporter | trembl\|AL049661\|SCE134_5 | 8.00E−38 |
| | | | | | system | | |
| NO. 269 | BL0425 | 540293 | 541618 | complement | solute binding protein of abc | trembl\|AL138851\|SCE59_5 | 2.00E−20 |
| | | | | | transporter | | |
| NO. 270 | BL0426 | 542104 | 543126 | + | lacti-type transcriptional regulator | swiss\|O87590\|CELR_THEFU | 3.00E−40 |
| NO. 271 | BL0427 | 543141 | 544646 | complement | hypothetical protein kinaase in | swiss\|Q46189\|YHGIf_CLOPA | 2.00E−78 |
| | | | | | abc1 family | | |
| NO. 272 | BL0429 | 545394 | 546146 | complement | possible cobyric acid synthase | trembl\|AF080002\|AF080002_2 | 3.00E−47 |
| | | | | | cobq | | |
| NO. 273 | BL0430 | 546249 | 547721 | complement | narrowly conserved hypothetical | trembl\|D90914\|SSD914_7 | 9.00E−48 |
| | | | | | protein with mur | | |
| NO. 274 | BL0431 | 547721 | 549250 | complement | replicative dna helicase (EC | trembl\|AL049826\|SCH24_3 | 5.00E−145 |
| | | | | | 3.6.1.—) (dnaB) | | |
| NO. 275 | BL0432 | 549306 | 550901 | + | hypothetical protein in upf0013 | trembl\|AL049826\|SCH24_2 | 3.00E−62 |
| NO. 276 | BL0433 | 550935 | 552761 | complement | protein-pii; uridylyltransferase | swiss\|O69873\|GLND_STRCO | 1.00E−90 |
| | | | | | (EC 2.7.7.59) | | |
| NO. 277 | BL0434 | 552869 | 553207 | complement | nitrogen regulatory protein p-ii. | pironly\|T35668\|T35668 | 4.00E−43 |
| | | | | | (glnB) | | |
| NO. 278 | BL0435 | 553209 | 554504 | complement | possible ammonium ion | trembl\|AJ010319\|CAJ10319_2 | 5.00E−124 |
| | | | | | transporter (amtP) | | |
| NO. 279 | BL0436 | 554872 | 556134 | complement | ftsy signal recognition particle | trembl\|AJ034447\|SC7A1_24 | 5.00E−102 |
| | | | | | (docking | | |
| NO. 280 | BL0437 | 556239 | 557078 | + | probable tetr-type transcriptional | trembl\|Z92539\|MTCY10G2_6 | 9.00E−51 |
| | | | | | regulator | | |
| NO. 281 | BL0438 | 557102 | 558136 | + | probable glycosyltransferase | trembl\|AJ006986\|SPAJ6986_9 | 1.00E−26 |
| NO. 282 | BL0439 | 558210 | 559898 | complement | dipeptidase (pepD) | trembl\|Z38063\|LHDIPEP_1 | 8.00E−97 |
| NO. 283 | BL0440 | 560039 | 561706 | + | glucose-6-phosphate 1- | trembl\|AL096839\|SCC22_19 | 0 |
| | | | | | dehydrogenase (EC | | |
| NO. 284 | BL0441 | 561703 | 562728 | + | narrowly conserved hypothetical | trembl\|AL031107\|SC5A7_10 | 1.00E−57 |
| | | | | | protein with | | |
| NO. 285 | BL0443 | 562865 | 563797 | + | probable 6- | swiss\|Q9XAB7\|6PGL_STRCO | 1.00E−37 |
| | | | | | phosphogluconolactonase (EC | | |
| | | | | | 3.1.1.31) | | |
| NO. 286 | BL0444 | 564101 | 565555 | complement | 6-phosphogluconate | trembl\|Z83859\|MTCY359_7 | 5.00E−167 |
| | | | | | dehydrogenase, | | |
| NO. 287 | BL0446 | 567375 | 570005 | + | hypothetical membrane protein | pironly\|A48653\|A48653 | 9.00E−34 |
| | | | | | with similarity to | | |
| NO. 288 | BL0447 | 570002 | 572164 | + | hypothetical membrane protein | trembl\|AE000938\|AE000938_8 | 3.00E−56 |
| | | | | | with similarity to | | |
| NO. 289 | BL0450 | 573563 | 574360 | complement | atp binding protein of abc | trembl\|AL139079\|CJ11168X6_108 | 2.00E−65 |
| | | | | | transporter | | |
| NO. 290 | BL0451 | 574376 | 575599 | complement | possible permease protein of abc | trembl\|AL139079\|CJ11168X6_107 | 3.00E−20 |
| | | | | | transporter | | |
| NO. 291 | BL0452 | 575633 | 576937 | complement | possible permease protein of abc | trembl\|AL139079\|CJ11168X6_106 | 3.00E−48 |
| | | | | | transporter | | |
| NO. 292 | BL0454 | 578386 | 579069 | complement | narrowly conserved hypothetical | swiss\|P19478\|TA34_TREPA | 7.00E−36 |
| | | | | | protein | | |
| NO. 293 | BL0455 | 579244 | 581055 | complement | widely conserved hypothetical | trembl\|AE001265\|AE001265_1 | 3.00E−55 |
| | | | | | membrane protein | | |
| NO. 294 | BL0457 | 582190 | 582831 | complement | narrowly conserved hypothetical | trembl\|Z99122\|BSUB0019_159 | 1.00E−38 |
| | | | | | protein with | | |
| NO. 295 | BL0458 | 582999 | 583358 | + | narrowly conserved hypothetical | trembl\|AL139079\|CJ11168X6_4 | 5.00E−29 |
| | | | | | protein with | | |
| NO. 296 | BL0460 | 584343 | 585326 | + | probable lysr-type transcriptional | swiss\|P39592\|YWBI_BACSU | 4.00E−21 |
| | | | | | regulator | | |
| NO. 297 | BL0461 | 585539 | 586423 | complement | is3-type transposase | tremblnew\|AE000433\|ECAE433_4 | 1.00E−46 |
| NO. 298 | BL0464 | 587533 | 593433 | complement | narrowly conserved hypothetical | trembl\|AL031155\|SC3A7_16 | 5.00E−144 |
| | | | | | protein with | | |
| NO. 299 | BL0465 | 593602 | 594786 | + | transpsosase in is256 family | swiss\|Q52873\|TRA5_RHIME | 5.00E−61 |
| NO. 300 | BL0469 | 596683 | 598203 | complement | glutamyl-trna synthetase (EC | swiss\|O33120\|SYE_MYCLE | 5.00E−163 |
| | | | | | 6.1.1.17) | | |
| NO. 301 | BL0472 | 600060 | 600977 | complement | widely conserved hypothetical | pironly\|G82131\|G82131 | 5.00E−30 |
| | | | | | protein with | | |
| NO. 302 | BL0474 | 602113 | 602772 | complement | hypothetical protein with possible | tremblnew\|AL392176\|SCD65_13 | 2.00E−36 |
| NO. 303 | BL0475 | 603034 | 604479 | + | hypothetical membrane protein | trembl\|AL009204\|SC9B10_25 | 3.00E−32 |
| | | | | | with unknown | | |
| NO. 304 | BL0478 | 606009 | 607526 | complement | formate-tetrahydrofolate ligase | tremblnew\|AL162753\|NMA2Z2491_{—} | 3.00E−47 |
| | | | | | (EC 6.3.4.3) | 232 | |
| NO. 305 | BL0479 | 607686 | 609287 | complement | dipeptidase (pepD) | trembl\|Z38063\|LHDIPEP_1 | 5.00E−105 |
| NO. 306 | BL0481 | 610303 | 611805 | + | is21-type transposase | tremblnew\|AP001520\|AP001520_{—} | 4.00E−52 |
| NO. 307 | BL0482 | 611886 | 612587 | + | istb-like protein | tremblnew\|AJ414141\|AJ414141_30 | 1.00E−32 |
| NO. 308 | BL0483 | 612690 | 613850 | complement | possible dna polymerase iii delta | trembl\|AL035636\|SCH5_3 | 6.00E−57 |
| | | | | | prime | | |
| NO. 309 | BL0484 | 613847 | 614428 | complement | thymidylate kinase (EC 2.7.4.9) | trembl\|AL035636\|SCH5_5 | 9.00E−47 |
| | | | | | (dtmp kinase) | | |
| NO. 310 | BL0485 | 614745 | 617837 | complement | dna topoisomerase i (EC 5.99.1.2) | swiss\|Q9X909\|TOP1_STRCO | 0 |
| | | | | | (relaxing | | |
| NO. 311 | BL0487 | 619475 | 621889 | + | probable penicillin-binding protein | gp\|AL353832\|7636001 | 7.00E−84 |
| NO. 312 | BL0488 | 621961 | 623877 | complement | 2-isopropylmalate synthase (EC | swiss\|P96420\|LEU1_MYCTU | 0 |
| | | | | | 4.1.3.12) (leuA) | | |
| NO. 313 | BL0491 | 626149 | 626862 | complement | hypothetical protein with unknown | gp\|AL353815\|7635958 | 1.00E−20 |
| | | | | | function | | |
| NO. 314 | BL0492 | 626937 | 628031 | + | aspartate-semialdehyde | swissnew\|P41394\|DHAS_LEPIN | 3.00E−71 |
| | | | | | dehydrogenase (EC | | |
| NO. 315 | BL0493 | 628113 | 628655 | complement | aspartokinase (EC 2.7.2.4) | trembl\|AL079348\|SC66T3_26 | 3.00E−44 |
| | | | | | (aspartokinase beta | | |
| NO. 316 | BL0494 | 628735 | 629499 | complement | aspartokinase (EC 2.7.2.4) | swissnew\|P41403\|AK_MYCSM | 2.00E−86 |
| | | | | | (aspartokinase alpha | | |
| NO. 317 | BL0495 | 629860 | 631143 | complement | narrowly conserved hypothetical | trembl\|Z97182\|MTCY19H5_12 | 9.00E−21 |
| | | | | | protein with | | |
| NO. 318 | BL0498 | 632032 | 633165 | + | possible sortase-like protein | trembl\|AF019629\|AF019629_2 | 3.00E−45 |
| NO. 319 | BL0499 | 633162 | 633764 | complement | recombination protein recr (recR) | swissnew\|Q9XAI4\|RECR_STRCO | 4.00E−70 |
| NO. 320 | BL0500 | 633790 | 636702 | complement | dna polymerase iii subunit | trembl\|AL118514\|SCD25_3 | 5.00E−123 |
| | | | | | gamma/tau (EC | | |
| NO. 321 | BL0502 | 637695 | 638825 | complement | narrowly conserved hypothetical | trembl\|AL021925\|MTV022_2 | 5.00E−23 |
| | | | | | protein with | | |
| NO. 322 | BL0508 | 641511 | 642578 | complement | hypothetical protein possibly | trembl\|AL035636\|SCH5_19 | 9.00E−56 |
| | | | | | involved in | | |
| NO. 323 | BL0510 | 643758 | 644483 | complement | deda integral membrane protein | swissnew\|P09548\|DEDA_ECOLI | 2.00E−37 |
| | | | | | (dsg-1 protein) | | |
| NO. 324 | BL0512 | 645418 | 646221 | complement | 3-oxoacyl-[acyl-carrier protein] | tremblnew\|AP001515\|AP001515_{—} | 1.00E−44 |
| | | | | | reductase (EC | 225 | |
| NO. 325 | BL0515 | 648919 | 650271 | complement | hypothetical transmembrane | trembl\|AE001862\|AE001862_175 | 4.00E−58 |
| | | | | | protein in | | |
| NO. 326 | BL0516 | 650544 | 651131 | complement | probable merr-type-transcriptional | swissnew\|P40183\|HSPR_STRCO | 7.00E−20 |
| | | | | | regulator | | |
| NO. 327 | BL0517 | 651146 | 652165 | complement | chaperone protein dnaj. (dnaJ) | trembl\|AB009842\|AB009842_3 | 4.00E−40 |
| NO. 328 | BL0519 | 652397 | 653056 | complement | grpe protein (hsp-70 cofactor) | swissnew\|Q05562\|GRPE_STRCO | 1.00E−27 |
| | | | | | (grpE) | | |
| NO. 329 | BL0520 | 653053 | 654933 | complement | dnak protein (heat shock protein | swiss\|Q05558\|DNAK_STRCO | 0 |
| | | | | | 70) (hsp70) | | |
| NO. 330 | BL0523 | 655916 | 657997 | complement | possible xylosidase or glucosidase | tremblnew\|AL512980\|SSOLP2N19_{—} | 1.00E−41 |
| | | | | | | 30 | |
| NO. 331 | BL0524 | 658565 | 659281 | complement | possible permease protein of abc | trembl\|AL009199\|SC7B7_4 | 5.00E−21 |
| | | | | | transporter | | |
| NO. 332 | BL0525 | 659551 | 660561 | + | probable laci-type transcriptional | trembl\|AL136502\|SCF43_17 | 7.00E−31 |
| | | | | | regulator | | |
| NO. 333 | BL0527 | 661816 | 664053 | + | 4-alpha-glucanotransferase (EC | swiss\|O53932\|MALQ_MYCTU | 5.00E−158 |
| | | | | | 2.4.1.25) | | |
| NO. 334 | BL0528 | 664185 | 665219 | + | probable laci-type transcriptional | trembl\|AL121596\|SC51A_33 | 1.00E−28 |
| | | | | | regulator | | |
| NO. 335 | BL0529 | 665379 | 667193 | + | probable alpha-1,4-glucosidase | trembl\|AF105219\|AP105219_2 | 5.00E−143 |
| | | | | | (EC 3.2.1.10); | | |
| NO. 336 | BL0530 | 667273 | 668334 | complement | ketol-acid reductoisomerase (EC | swiss\|Q9Z565\|ILVC_STRCO | 5.00E−106 |
| | | | | | 1.1.1.86) | | |
| NO. 337 | BL0531 | 668754 | 669806 | complement | ketol-acid reductoisomerase (EC | swiss\|Q9Z565\|ILVC_STRCO | 5.00E−109 |
| | | | | | 1.1.1.86) | | |
| NO. 338 | BL0532 | 670003 | 671523 | complement | transmembrane transport protein | tremblnew\|AE005578\|AE005578_1 | 5.00E−118 |
| | | | | | possibly for | | |
| NO. 339 | BL0533 | 671998 | 673041 | complement | laci-type transcriptional regulator | swiss\|Q54430\|SCRR_STRMU | 1.00E−39 |
| | | | | | (scrR) | | |
| NO. 340 | BL0536 | 674947 | 676473 | complement | sucrose phosphorylase (EC | trembl\|AF065245\|AF065245_3 | 5.00E−149 |
| | | | | | 2.4.1.7) (sucrose | | |
| NO. 341 | BL0537 | 676808 | 677857 | + | truncated transposase | trembl\|AP000342\|AP000342_11 | 1.00E−51 |
| NO. 342 | BL0538 | 677944 | 678999 | complement | probable integrase/recombinase | swissnew\|P55636\|Y4RC_RHISN | 9.00E−20 |
| NO. 343 | BL0540 | 679958 | 681160 | complement | possible integrase/recombinase | swissnew\|P55639\|Y4RF_RHISN | 3.00E−20 |
| NO. 344 | BL0543 | 682749 | 683783 | complement | laci-type transcriptional regulator | tremblnew\|AP001514\|AP001514_{—} | 1.00E−35 |
| | | | | | | 225 | |
| NO. 345 | BL0544 | 683955 | 685754 | complement | alpha-1-arabinofuranosidase a (EC | gp\|AL163003\|7414545 | 5.00E−161 |
| | | | | | 3.2.1.55) | | |
| NO. 346 | BL0545 | 685919 | 687712 | complement | possible low-affinity potassium | pironly\|C83530\|C83530 | 2.00E−65 |
| | | | | | uptake system | | |
| NO. 347 | BL0546 | 687912 | 688997 | complement | laci-type transcriptional regulator | swiss\|Q54430\|SCRR_STRMU | 7.00E−37 |
| NO. 348 | BL0548 | 690945 | 692528 | complement | probable voltage gated channel | pironly\|C82449\|C82449 | 2.00E−50 |
| | | | | | protein | | |
| NO. 349 | BL0549 | 692552 | 693838 | complement | adenylosuccinate synthetase (EC | swiss\|Q9X8P6\|PURA_STRCO | 5.00E−176 |
| | | | | | 6.3.4.4) | | |
| NO. 350 | BL0550 | 694054 | 695121 | + | fructose-bisphosphate aldolase | swiss\|O06313\|ALF_MYCTU | 5.00E−119 |
| | | | | | (EC 4.1.2.13) | | |
| NO. 351 | BL0551 | 695332 | 696252 | complement | possible protease htpx (EC | swiss\|O06429\|HTPX_MYCTU | 1.00E−69 |
| | | | | | 3.4.24.—) (htpX) | | |
| NO. 352 | BL0552 | 696445 | 697896 | complement | probable ferredoxin/ferredoxin- | trembl\|AL132856\|SCF15_2 | 5.00E−111 |
| | | | | | nadp reductase ( | | |
| NO. 353 | BL0553 | 698027 | 698869 | + | conserved hypothetical protein | trembl\|Z97182\|MTCY19H5_12 | 5.00E−22 |
| | | | | | with unknown | | |
| NO. 354 | BL0554 | 699209 | 701368 | complement | probable cation-transporting | trembl\|AL109962\|SCJ1_13 | 4.00E−83 |
| | | | | | atpase v (EC | | |
| NO. 355 | BL0555 | 701780 | 703807 | complement | possible do serine protease (EC | trembl\|AE001732\|AB001732_1 | 5.00E−51 |
| | | | | | 3.4.21.—) (degP | | |
| NO. 356 | BL0556 | 704224 | 705537 | + | queuine trna-ribosyltransferase | swiss\|O32053\|TGT_BACSU | 8.00E−84 |
| | | | | | (EC 2.4.2.29) | | |
| NO. 357 | BL0560 | 706974 | 707657 | + | hypothetical transmembrane | trembl\|AB003158\|AB003158_1 | 7.00E−28 |
| | | | | | protein with unknown | | |
| NO. 358 | BL0562 | 708341 | 708673 | complement | widely conserved hypothetical | pironly\|G82395\|G82395 | 3.00E−28 |
| | | | | | protein with | | |
| NO. 359 | BL0563 | 708789 | 710270 | + | probable type ii restriction enzyme | trembl\|AF051563\|AF051563_1 | 1.00E−37 |
| | | | | | similar to | | |
| NO. 360 | BL0564 | 710277 | 711548 | complement | modification methylase sau3ai | trembl\|AF051563\|AF051563_3 | 1.00E−74 |
| | | | | | (EC 2.1.1.73) | | |
| NO. 361 | BL0568 | 714565 | 715548 | complement | peptide methionine sulfoxide | tremblnew\|AL162752\|NMA1Z2491_{—} | 1.00E−86 |
| | | | | | reductase. (msrA) | 273 | |
| NO. 362 | BL0570 | 716076 | 718649 | complement | hypothetical protein with unknown | swissnew\|P94974\|SYK2_MYCTU | 1.00E−23 |
| | | | | | function | | |
| NO. 363 | BL0575 | 720885 | 721994 | complement | narrowly conserved hypothetical | tremblnew\|AE005358\|AE005358_4 | 4.00E−58 |
| | | | | | protein with | | |
| NO. 364 | BL0577 | 723052 | 723771 | complement | tela-like protein associated with | swiss\|P37535\|YAAN_BACSU | 3.00E−40 |
| | | | | | cryptic | | |
| NO. 365 | BL0582 | 727987 | 730431 | + | probable dipeptidyl peptidase iv | trembl\|D83263\|SMD263_1 | 1.00E−56 |
| NO. 366 | BL0583 | 730616 | 731317 | + | hypothetical protein with fha | trembl\|AL079308\|SCH69_13 | 8.00E−23 |
| | | | | | domain | | |
| NO. 367 | BL0584 | 731347 | 731877 | + | hypothetical protein with fha | trembl\|AL079308\|SCH69_14 | 6.00E−33 |
| | | | | | domain | | |
| NO. 368 | BL0585 | 731882 | 733576 | + | possible phosphoprotein | trembl\|AL079308\|SCH69_15 | 1.00E−61 |
| | | | | | phosphatase | | |
| NO. 369 | BL0586 | 733573 | 735132 | + | protein involved in cell wall | trembl\|AL079308\|SCH69_16 | 5.00E−103 |
| | | | | | farmation and | | |
| NO. 370 | BL0587 | 735129 | 736595 | + | probable penicillin binding | trembl\|Z80233\|MTCY10H4_14 | 1.00E−80 |
| | | | | | protein | | |
| NO. 371 | BL0588 | 736592 | 737542 | + | probable serine-threonine protein | swiss\|P71585\|PKNA_MYCTU | 5.00E−59 |
| | | | | | kinase (pknA) | | |
| NO. 372 | BL0589 | 737539 | 739611 | + | probable serine/threonine-protein | trembl\|AL079308\|SCH69_18 | 5.00E−106 |
| | | | | | kinase pknb | | |
| NO. 373 | BL0590 | 739837 | 740481 | complement | para-aminobenzoate synthase | trembl\|AL079308\|SCH69_21 | 8.00E−62 |
| | | | | | glutamine | | |
| NO. 374 | BL0591 | 740532 | 741770 | complement | hypothetical transmembrane | trembl\|AL079308\|SCH69_19 | 1.00E−26 |
| | | | | | protein with unknown | | |
| NO. 375 | BL0592 | 741767 | 742567 | complement | narrowly conserved hypothetical | trembl\|AL079308\|SCH69_23 | 6.00E−30 |
| | | | | | protein with | | |
| NO. 376 | BL0594 | 743795 | 744640 | complement | conserved membrane protein in | trembl\|AL021926\|MTV031_3 | 9.00E−24 |
| | | | | | rhomboid family | | |
| NO. 377 | BL0597 | 745313 | 747838 | complement | glycogen phosphorylase (EC | trembl\|D90907\|SSD907_48 | 0 |
| | | | | | 2.4.1.1) (glgP) | | |
| NO. 378 | BL0600 | 749019 | 750110 | + | tryptophanyl-trna synthetase (EC | trembl\|AE001959\|AE001959_7 | 1.00E−58 |
| | | | | | 6.1.1.2) | | |
| NO. 379 | BL0601 | 750288 | 752075 | complement | widely conserved hypothetical | trembl\|AE002083\|AE002083_5 | 6.00E−36 |
| | | | | | protein with | | |
| NO. 380 | BL0602 | 752125 | 753765 | complement | possible sodium/proline symporter | swiss\|O06493\|OPUE_BACSU | 5.00E−104 |
| | | | | | (opuE) | | |
| NO. 381 | BL0604 | 756164 | 758917 | + | phosphoenolpyruvate carboxylase | swiss\|P28594\|CAPP_ANASP | 5.00E−110 |
| | | | | | (EC 4.1.1.31) | | |
| NO. 382 | BL0609 | 762024 | 763673 | complement | hypothetical protein possibly | trembl\|AE002053\|AE002053_3 | 3.00E−34 |
| | | | | | related to | | |
| NO. 383 | BL0610 | 763888 | 764895 | complement | laci-type transcriptional regulator | trembl\|AE001777\|AE001777_1 | 6.00E−24 |
| NO. 384 | BL0613 | 765441 | 766727 | + | probable integral membrane | tremblnew\|AP001515\|AP001515_{—} | 1.00E−68 |
| | | | | | transporter | 262 | |
| NO. 385 | BL0614 | 766844 | 768760 | complement | thioredoxin reductase (EC 1.6.4.5) | pironly\|D35156\|D35156 | 2.00E−75 |
| | | | | | (trxB) | | |
| NO. 386 | BL0615 | 768929 | 769492 | complement | alkyl hydroperoxide reductase c22 | trembl\|AF016233\|AF016233_2 | 9.00E−66 |
| | | | | | protein (EC | | |
| NO. 387 | BL0616 | 769698 | 770381 | + | probablecarbonic anhydrase (EC | trembl\|AL022075\|MTV024_6 | 1.00E−36 |
| | | | | | 4.2.1.1) (icfA) | | |
| NO. 388 | BL0617 | 770719 | 771984 | + | widely conserved hypothetical | swiss\|P74409\|Y260_SYNY3 | 2.00E−55 |
| | | | | | protein with duf21 | | |
| NO. 389 | BL0618 | 772081 | 772560 | + | hypothetical protein in dps family | trembl\|AF068267\|AF068267_1 | 4.00E−30 |
| NO. 390 | BL0620 | 774367 | 774732 | complement | probable gluconokinase (EC | trembl\|AE002030\|AE002030_3 | 1.00E−25 |
| | | | | | 2.7.1.12) (gluconate | | |
| NO. 391 | BL0622 | 775637 | 776743 | + | conserved hypothetical protein | swiss\|P44099\|YA38_HAEIN | 1.00E−38 |
| | | | | | with unknown | | |
| NO. 392 | BL0628 | 779817 | 781151 | complement | aspartate aminotransferase (EC | tremblnew\|AP001518\|AP001518_{—} | 7.00E−68 |
| | | | | | 2.6.1.1) | 181 | |
| NO. 393 | BL0629 | 781357 | 781791 | + | asnc-type transcriptional regulator | trembl\|Z92771\|MTCY71_31 | 1.00E−32 |
| NO. 394 | BL0630 | 782110 | 783456 | + | nadp-specific glutamate | tremblnew\|AP001514\|AP001514_{—} | 5.00E−162 |
| | | | | | dehydrogenase (EC | 107 | |
| NO. 395 | BL0631 | 783833 | 785254 | complement | hypothetical protein with unknown | trembl\|AP000004\|AP000004_110 | 3.00E−67 |
| | | | | | function | | |
| NO. 396 | BL0634 | 786722 | 789373 | complement | dna gyrase subunit a (EC | swiss\|P35885\|GYRA_STRCO | 0 |
| | | | | | 5.99.1.3) (gyrA) | | |
| NO. 397 | BL0635 | 789441 | 791531 | complement | dna gyrase subunit b, novobiocin- | swiss\|P50075\|GYBS_STRSH | 0 |
| | | | | | sensitive (EC | | |
| NO. 398 | BL0637 | 792179 | 793366 | complement | recombination protein recf (recF) | swissnew\|P36176\|RECF_STRCO | 7.00E−60 |
| NO. 399 | BL0638 | 793445 | 794569 | complement | dna polymerase iii, beta chain (EC | swissnew\|P27903\|DP3B_STRCO | 2.00E−88 |
| | | | | | 2.7.7.7) | | |
| NO. 400 | BL0640 | 795305 | 796807 | complement | chromosomal replication initiator | trembl\|AF222789\|AF222789_7 | 5.00E−103 |
| | | | | | protein dnaa. | | |
| NO. 401 | BL0644 | 797963 | 798970 | + | conserved hypothetical | trembl\|AF031590\|AF031590_7 | 6.00E−37 |
| | | | | | transmembrane protein in | | |
| NO. 402 | BL0645 | 799094 | 799627 | + | narrowly conserved hypothetical | trembl\|AF031590\|AF031590_6 | 2.00E−40 |
| | | | | | protein with | | |
| NO. 403 | BL0646 | 799779 | 800444 | + | possible glucose inhibited division | swiss\|O54571\|GIDB_STRCO | 4.00E−33 |
| | | | | | protein b. | | |
| NO. 404 | BL0647 | 800655 | 801665 | + | chromosome partitioning protein | trembl\|AF187159\|AF187159_5 | 1.00E−76 |
| | | | | | para (parA) | | |
| NO. 405 | BL0648 | 801665 | 803026 | + | probable chromosome partitioning | trembl\|AF031590\|AF031590_3 | 4.00E−68 |
| | | | | | protein (parB) | | |
| NO. 406 | BL0649 | 803332 | 804357 | complement | thioredoxin reductase (EC 1.6.4.5) | swissnew\|O30973\|TRXB_MYCSM | 4.00E−87 |
| | | | | | (trxB) | | |
| NO. 407 | BL0651 | 806617 | 808344 | complement | conserved hypothetical membrane | trembl\|AL049826\|SCH24_16 | 2.00E−50 |
| | | | | | protein in mvin | | |
| NO. 408 | BL0653 | 810608 | 812059 | complement | hypothetical protein with possible | trembl\|Z94121\|MTY15F10_27 | 3.00E−28 |
| | | | | | c-terminal | | |
| NO. 409 | BL0654 | 811999 | 813402 | + | probable rna | trembl\|AL049826\|SCH24_18 | 5.00E−162 |
| | | | | | nucleotidyltransferase (pcnA or | | |
| NO. 410 | BL0656 | 814163 | 815113 | complement | 4-diphosphocytidyl-2-c-methyl-d- | swissnew\|O05596\|ISPE_MYCTU | 1.00E−30 |
| | | | | | erythritol | | |
| NO. 411 | BL0657 | 815110 | 816036 | complement | dimethyladenosine transferase | trembl\|Z94752\|MTC1237_22 | 8.00E−66 |
| | | | | | (EC 2.1.1.—) | | |
| NO. 412 | BL0660 | 819239 | 821479 | complement | widely conserved protein with | trembl\|AL157953\|SCL11_7 | 7.00E−34 |
| | | | | | eukaryotic protein | | |
| NO. 413 | BL0669 | 826542 | 826949 | + | nrdi-like protein (nrdI) | swiss\|P95107\|NRDI_MYCTU | 1.00E−33 |
| NO. 414 | BL0670 | 827065 | 829260 | + | ribonucleoside-diphosphate | trembl\|L34407\|MTRSOR_1 | 0 |
| | | | | | reductase 2 alpha | | |
| NO. 415 | BL0671 | 829572 | 830564 | + | ribonucleoside-diphosphate | trembl\|U41100\|MT41100_1 | 5.00E−153 |
| | | | | | reductase 2 beta | | |
| NO. 416 | BL0672 | 830643 | 831803 | + | probable glycosyltransferase | tremblnew\|AF267127\|AF267127_11 | 1.00E−33 |
| NO. 417 | BL0673 | 832163 | 833290 | + | atp binding protein of abc | trembl\|Y08921\|SRMSIK_1 | 5.00E−127 |
| | | | | | transporter for | | |
| NO. 418 | BL0676 | 843651 | 844637 | + | sortase-like protein similar to | trembl\|AF019629\|AF019629_2 | 4.00E−43 |
| NO. 419 | BL0679 | 845958 | 847370 | + | narrowly conserved hypothetical | trembl\|AL357613\|SC5F8_10 | 5.00E−116 |
| | | | | | protein with | | |
| NO. 420 | BL0680 | 847477 | 847986 | complement | possible trna/rrna | gp\|AL160331\|7242757 | 2.00E−66 |
| | | | | | methyltransferase (EC | | |
| NO. 421 | BL0681 | 848557 | 849855 | + | conserved hypotheticaltransport | tremblnew\|AP001518\|AP001518_42 | 7.00E−28 |
| | | | | | protein | | |
| NO. 422 | BL0682 | 849868 | 850764 | + | protein probably involved in xylan | swiss\|P26223\|XYNB_BUTFI | 9.00E−35 |
| | | | | | degradation; | | |
| NO. 423 | BL0683 | 850947 | 853934 | + | cation-transporting atpase pacl | tremblnew\|AP001515\|AP001515_{—} | 0 |
| | | | | | (EC 3.6.1.—) | 249 | |
| NO. 424 | BL0684 | 854349 | 855533 | + | transpsosase in is256 family | swiss\|Q52873\|TRA5_RHIME | 5.00E−61 |
| NO. 425 | BL0685 | 855689 | 856459 | + | hisf cyclase (hisF) | trembl\|AL096884\|SC4G6_17 | 2.00E−96 |
| NO. 426 | BL0686 | 856593 | 856988 | + | probable phosphoribosyl-amp | trembl\|AL096884\|SC4G6_13 | 4.00E−39 |
| | | | | | cyclohydrolase (EC | | |
| NO. 427 | BL0687 | 857069 | 858625 | + | anthranilate synthase component i | swiss\|P96556\|TRPE_ARTGO | 5.00E−147 |
| | | | | | (EC 4.1.3.27) | | |
| NO. 428 | BL0689 | 858941 | 860542 | + | atp binding protein of abc | trembl\|AL132644\|SCI8_25 | 0 |
| | | | | | transporter | | |
| NO. 429 | BL0691 | 861364 | 861732 | + | narrowly conserved protein with | trembl\|AL118514\|SCD25_30 | 9.00E−23 |
| | | | | | unknown | | |
| NO. 430 | BL0693 | 862453 | 864066 | complement | atp binding protein of abc | trembl\|AE000829\|AE000829_9 | 3.00E−67 |
| | | | | | transporter | | |
| NO. 431 | BL0696 | 865593 | 866864 | complement | is30-type transposase | trembl\|AL021646\|MTV014_36 | 1.00E−78 |
| NO. 432 | BL0702 | 875125 | 878160 | + | excinuclease abc subunit a (uvrA) | swiss\|P94972\|UVRA_MYCTU | 0 |
| NO. 433 | BL0703 | 878310 | 880676 | + | excinuclease abc subunit c (uvrC) | swiss\|Q9Z512\|UVRC_STRCO | 5.00E−180 |
| NO. 434 | BL0704 | 880785 | 881756 | + | probable shikimate 5- | trembl\|Z83863\|MTCY159_29 | 9.00E−27 |
| | | | | | dehydrogenase (EC 1.1.1.25) | | |
| NO. 435 | BL0705 | 881756 | 882742 | + | widely conserved hypothetical | trembl\|AF106003\|AF106003_2 | 4.00E−82 |
| | | | | | protein with | | |
| NO. 436 | BL0706 | 882941 | 883891 | + | narrowly conserved hypothetical | trembl\|Z80108\|MTCY21B4_38 | 2.00E−71 |
| | | | | | protein with | | |
| NO. 437 | BL0707 | 883940 | 885265 | + | phosphoglycerate kinase (EC | swiss\|Q9Z519\|PGK_STRCO | 5.00E−137 |
| | | | | | 2.7.2.3) (pgk) | | |
| NO. 438 | BL0708 | 885322 | 886125 | + | triosephosphate isomerase (EC | swiss\|O08408\|TPIS_MYCTU | 9.00E−68 |
| | | | | | 5.3.1.1) (tim) | | |
| NO. 439 | BL0710 | 886539 | 887489 | + | 1-lactate dehydrogenase (EC | trembl\|AB033627\|AB033627_1 | 1.00E−67 |
| | | | | | 1.1.1.27) (ldh) | | |
| NO. 440 | BL0712 | 888460 | 890004 | + | probable aminotransferase hi0286 | swiss\|P71348\|YFBQ_HAEIN | 5.00E−151 |
| | | | | | (EC 2.6.1.—) | | |
| NO. 441 | BL0714 | 891415 | 892752 | complement | branched-chain amino acid | trembl\|U79494\|BSU79494_1 | 3.00E−73 |
| | | | | | transport system | | |
| NO. 442 | BL0715 | 892881 | 893984 | complement | transaldolase (EC 2.2.1.2) (tal) | swiss\|O06812\|TAL_MYCTU | 5.00E−108 |
| NO. 443 | BL0716 | 894105 | 896213 | complement | transketolase (EC 2.2.1.1) (tkt) | trembl\|AL03I107\|SC5A7_13 | 0 |
| NO. 444 | BL0718 | 896588 | 897706 | + | heat-inducible transcription | swissnew\|Q9RDD6\|HRCA_STRCO | 1.00E−70 |
| | | | | | repressor (hrcA) | | |
| NO. 445 | BL0719 | 897762 | 898907 | + | chaperone protein (dnaJ) | swissnew\|O05825\|DNJ2_MYCTU | 4.00E−91 |
| NO. 446 | BL0720 | 898953 | 899744 | complement | conserved hypothetical protein | trembl\|D90916\|SSD916_76 | 9.00E−21 |
| | | | | | with unknown | | |
| NO. 447 | BL0721 | 899889 | 900773 | + | possible undecaprenol kinase | trembl\|Z95388\|MTCY270_6 | 9.00E−54 |
| | | | | | (bacA?) | | |
| NO. 448 | BL0722 | 900930 | 901787 | complement | narrowly conserved hypothetical | trembl\|U00017\|ML017_28 | 3.00E−35 |
| | | | | | protein with | | |
| NO. 449 | BL0724 | 902583 | 904616 | + | threonyl-trna synthetase (EC | trembl\|AL137778\|SCL2_21 | 0 |
| | | | | | 6.1.1.3) | | |
| NO. 450 | BL0725 | 904756 | 905340 | + | conserved hypothetical protein | trembl\|AL137778\|SCL2_20 | 1.00E−49 |
| | | | | | with hit domain | | |
| NO. 451 | BL0726 | 905479 | 906234 | + | widely conserved hypothetical | swiss\|O33214\|YQ03_MYCTU | 3.00E−84 |
| | | | | | protein in upf102 | | |
| NO. 452 | BL0727 | 906240 | 906824 | + | crossover junction | swiss\|Q50627\|RUVC_MYCTU | 2.00E−42 |
| | | | | | endodeoxyribonuclease ruve | | |
| NO. 453 | BL0728 | 906882 | 907508 | + | probable bolliday junction dna | trembl\|AL137778\|SCL2_9 | 3.00E−29 |
| | | | | | helicase ruva. | | |
| NO. 454 | BL0729 | 907508 | 908572 | + | bolliday junction dna helicase | trembl\|AL137778\|SCL2_8 | 5.00E−113 |
| | | | | | ruvb. (ruvB) | | |
| NO. 455 | BL0731 | 909135 | 909716 | + | adenine phosphoribosyltransferase | tremblnew\|AE005226\|AE005226_1 | 1.00E−36 |
| | | | | | (EC 2.4.2.7) | | |
| NO. 456 | BL0732 | 909813 | 911015 | + | succinyl-coa synthetase beta chain | trembl\|AL035500\|MLCL373_3 | 2.00E−95 |
| | | | | | (EC 6.2.1.5) | | |
| NO. 457 | BL0733 | 911015 | 911926 | + | succinyl-coa synthetase alpha | trembl\|AL035500\|MLCL373_4 | 3.00E−98 |
| | | | | | chain (EC 6.2.1.5) | | |
| NO. 458 | BL0735 | 913273 | 914910 | + | bifunctional purine biosynthesis | trembl\|AB003159\|AB003159_3 | 5.00E−171 |
| | | | | | protein purh | | |
| NO. 459 | BL0737 | 916421 | 917191 | + | ribosomal large subunit | swiss\|O33210\|YHI1_MYCTU | 2.00E−63 |
| | | | | | pseudouridine synthase b | | |
| NO. 460 | BL0738 | 917926 | 919317 | + | probable gtp binding protein | tremblnew\|AL445403\|SC2134_11 | 5.00E−164 |
| NO. 461 | BL0739 | 919672 | 921201 | + | probable utp-glucose-1-phosphate | swissnew\|Q9SDX3\|UDPG_MUSAC | 5.00E−57 |
| NO. 462 | BL0742 | 923595 | 926186 | + | probable helicase (heIY) | trembl\|AL132648\|SCI41_14 | 5.00E−150 |
| NO. 463 | BL0743 | 926301 | 926648 | + | narrowly conserved hypothetical | trembl\|AL133213\|SC6D7_15 | 3.00E−23 |
| | | | | | protein with | | |
| NO. 464 | BL0746 | 928449 | 929081 | complement | hypothetical protein with possible | swiss\|Q50603\|YI30_MYCTU | 4.00E−34 |
| | | | | | regulatory | | |
| NO. 465 | BL0747 | 929182 | 929625 | complement | possible signal transduction | trembl\|AF173844\|AF173844_2 | 8.00E−28 |
| | | | | | protein (garA) | | |
| NO. 466 | BL0748 | 929632 | 930453 | complement | narrowly conserved hypothetical | swiss\|Q50608\|YI25_MYCTU | 4.00E−23 |
| | | | | | protein with | | |
| NO. 467 | BL0748a | 930469 | 930801 | complement | hypothetical membrane protein | swiss\|Q50609\|YI24_MYCTU | 1.00E−30 |
| | | | | | with unknown | | |
| NO. 468 | BL0750 | 931768 | 932385 | complement | possible | swiss\|Q50611\|PGSA_MYCTU | 2.00E−22 |
| NO. 469 | BL0751 | 932399 | 933250 | complement | atp phosphoribosyltransferase (EC | swiss\|O33256\|HIS1_MYCTU | 2.00E−73 |
| | | | | | 2.4.2.17) | | |
| NO. 470 | BL0752 | 933262 | 933525 | complement | phosphoribosyl-atp | swissnew\|Q49786\|HIS2_MYCLE | 2.00E−25 |
| | | | | | pyrophosphatase (EC 3.6.1.31) | | |
| NO. 471 | BL0753 | 933588 | 934256 | complement | ribulose-phosphate 3-epimerase | gp\|AL159139\|7209224 | 2.00E−69 |
| | | | | | (EC 5.1.3.1) | | |
| NO. 472 | BL0754 | 934332 | 935279 | complement | probable prolipoprotein | trembl\|AL096884\|SC4G6_3 | 3.00E−55 |
| | | | | | diacylglyceryl | | |
| NO. 473 | BL0755 | 935392 | 936267 | complement | tryptophan synthase alpha chain | swiss\|O68906\|TRPA_MYCIT | 6.00E−65 |
| | | | | | (EC 4.2.1.20) | | |
| NO. 474 | BL0756 | 936285 | 938372 | complement | tryptophan synthase beta chain | swissnew\|O05625\|TRPB_STRCO | 5.00E−138 |
| | | | | | (EC 4.2.1.20) | | |
| NO. 475 | BL0757 | 938899 | 939750 | complement | probable endonuclease iv (EC | tremblnew\|AP001511\|AP001511_{—} | 1.00E−52 |
| | | | | | 3.1.21.2) | 275 | |
| NO. 476 | BL0758 | 939874 | 941274 | + | amino acid permease | trembl\|AB006424\|AB006424_71 | 5.00E−153 |
| NO. 477 | BL0764 | 944658 | 945116 | complement | narrowly conserved hypothetical | trembl\|AL031317\|SC6G4_19 | 9.00E−34 |
| | | | | | protein with | | |
| NO. 478 | BL0774 | 951598 | 952218 | complement | $$-like protein | tremblnew\|AP001517\|AP001517_{—} | 2.00E−37 |
| | | | | | | 211 | |
| NO. 479 | BL0778 | 954363 | 955937 | + | histidine permease (hutM) | trembl\|AB006424\|AB006424_71 | 5.00E−165 |
| NO. 480 | BL0779 | 956141 | 956791 | complement | probable signal peptidase i-2 (EC | trembl\|AL023797\|SC2E1_15 | 6.00E−37 |
| | | | | | 3.4.21.89) | | |
| NO. 481 | BL0783 | 959691 | 960881 | + | probable aminotransferase | trembl\|Z99109\|BSUB0006_32 | 2.00E−65 |
| NO. 482 | BL0784 | 960921 | 962684 | + | conserved hypothetical protein | trembl\|AL031317\|SC6G4_20 | 1.00E−50 |
| | | | | | with unknown | | |
| NO. 483 | BL0786 | 963517 | 964440 | + | lysr-type transcriptional regulator | trembl\|Y17221\|SA17221_1 | 4.00E−81 |
| | | | | | (cpsY) | | |
| NO. 484 | BL0788 | 966192 | 966887 | complement | orotate phosphoribosyltransferase | swiss\|P50587\|PYRE_PSEAE | 3.00E−44 |
| | | | | | (EC 2.4.2.10) | | |
| NO. 485 | BL0789 | 966896 | 967867 | complement | dihydroorotate dehydrogenase | swissnew\|O66461\|PYRD_AQUAE | 4.00E−69 |
| | | | | | (EC 1.3.3.1) | | |
| NO. 486 | BL0790 | 967870 | 968694 | complement | probable dihydroorotate | swissnew\|P25983\|PYRK_BACSU | 6.00E−31 |
| | | | | | dehydrogenase electron | | |
| NO. 487 | BL0791 | 968830 | 969783 | complement | orotidine 5′-phosphate | trembl\|AE002053\|AE002053_4 | 2.00E−39 |
| | | | | | decarboxylase (EC | | |
| NO. 488 | BL0792 | 969801 | 971297 | complement | dihydroorotase (EC 3.5.2.3) | swissnew\|P46538\|PYRC_BACCL | 6.00E−58 |
| | | | | | (dhoase) (pyrC) | | |
| NO. 489 | BL0793 | 971294 | 971713 | complement | aspartate carbamoyltransferase | swiss\|O26938\|PYRI_METTH | 2.00E−24 |
| | | | | | regulatory chain | | |
| NO. 490 | BL0794 | 971713 | 972693 | complement | aspartate carbamoyltransferase | swiss\|P77918\|PYRB_PYRAB | 2.00E−79 |
| | | | | | (EC 2.1.3.2) | | |
| NO. 491 | BL0795 | 972817 | 976047 | complement | glutamate-ammonia-ligase | swiss\|Q10379\|GLNE_MYCTU | 5.00E−179 |
| | | | | | adenylyltransferase (EC | | |
| NO. 492 | BL0796 | 976103 | 977056 | complement | choloylglycine hydrolase (EC | trembl\|AF054971\|AF054971_3 | 3.00E−73 |
| | | | | | 3.5.1.24) | | |
| NO. 493 | BL0797 | 977190 | 978044 | complement | 5,10-methylenetetrahydrofolate | trembl\|AL139077\|CJ11168X4_191 | 3.00E−56 |
| | | | | | reductase (EC | | |
| NO. 494 | BL0798 | 978103 | 980406 | complement | 5- | swissnew\|Q9PN94\|METE_CAMJE | 0 |
| | | | | | methyltetrahydropteroyltriglutamat | | |
| | | | | | e-homocysteine | | |
| NO. 495 | BL0800 | 981301 | 982371 | complement | hypothetical protein with | trembl\|AL132648\|SCI41_34 | 3.00E−63 |
| | | | | | similarity to pirnt | | |
| NO. 496 | BL0804 | 983910 | 984647 | complement | probable transcriptional activator | tremblnew\|AP001516\|AP001516_{—} | 5.00E−38 |
| | | | | | similar to | 108 | |
| NO. 497 | BL0806 | 985707 | 986216 | + | conserved hypothetical protein | pironly\|E83182\|E83182 | 1.00E−33 |
| | | | | | with unknown | | |
| NO. 498 | BL0821 | 996596 | 997183 | complement | possible thioredoxin-dependent | gp\|AL353832\|7636005 | 2.00E−38 |
| | | | | | thiol peroxidase | | |
| NO. 499 | BL0825 | 999293 | 1000039 | complement | probable atp binding protein of | trembl\|AL021287\|MTV012_55 | 6.00E−45 |
| | | | | | abc transporter | | |
| NO. 500 | BL0826 | 1000307 | 1001557 | complement | possible glycosyltransferase | trembl\|AL133278\|SCM11_17 | 5.00E−110 |
| | | | | | (glgA) | | |
| NO. 501 | BL0829 | 1004313 | 1005953 | complement | probable oligopeptide binding | trembl\|AL022121\|MTV025_15 | 5.00E−126 |
| | | | | | protein of abc | | |
| NO. 502 | BL0833 | 1008077 | 1009612 | complement | glutamate synthase [nadph] small | trembl\|AL109849\|SC3A3_3 | 5.00E−151 |
| | | | | | subunit (EC | | |
| NO. 503 | BL0834 | 1009614 | 1014185 | complement | glutamate synthase [nadph] large | trembl\|AL109849\|SC3A3_4 | 0 |
| | | | | | subunit (EC | | |
| NO. 504 | BL0838 | 1017184 | 1018230 | complement | laci-type transcriptional regulator | trembl\|AL158061\|SC6D11_7 | 1.00E−45 |
| NO. 505 | BL0842 | 1020867 | 1021508 | + | widely conserved hypothetical | tremblnew\|AP001514\|AP001514_{—} | 3.00E_27 |
| | | | | | transmembrane | 169 | |
| NO. 506 | BL0843 | 1021558 | 1022742 | complement | transpsosase in is256 family | swiss\|Q52873\|TRAS_RHIME | 5.00E−61 |
| NO. 507 | BL0844 | 1022814 | 1023548 | + | conserved hypothetical | tremblnew\|AP001514\|AP001514_{—} | 2.00E−20 |
| | | | | | transmembrane protein | 169 | |
| NO. 508 | BL0845 | 1023926 | 1025146 | complement | glycerate kinase (EC 2.7.1.31) | swissnew\|P42100\|GRK_BACSU | 1.00E−83 |
| | | | | | (glxK) | | |
| NO. 509 | BL0846 | 1025243 | 1026343 | + | laci-type transcriptional regulator | trembl\|AB016845\|AB016845_1 | 3.00E−36 |
| NO. 510 | BL0847 | 1026423 | 1027832 | complement | probable oxygen-independent | trembl\|AL136503\|SCC77_26 | 6.00E−80 |
| | | | | | coproporphyrinogen | | |
| NO. 511 | BL0848 | 1027832 | 1029712 | complement | gtp-binding protein lepa (lepA) | swiss\|P71739\|LEPA_MYCTU | 0 |
| NO. 512 | BL0850 | 1030371 | 1031162 | complement | conserved hypothetical | swissnew\|O86576\|YU26_STRCO | 6.00E−35 |
| | | | | | transmembrane protein | | |
| NO. 513 | BL0851 | 1031410 | 1032342 | complement | conserved hypothetical protein | swiss\|P33653\|YBL1_STRCI | 8.00E−27 |
| | | | | | similar to mazg | | |
| NO. 514 | BL0852 | 1032503 | 1033630 | complement | probable branched-chain amino | piromly\|A82612\|A82612 | 5.00E−103 |
| | | | | | acid | | |
| NO. 515 | BL0853 | 1033855 | 1034475 | complement | probable 50s ribosomal protein | swiss\|P96385\|RL25_MYCTU | 4.00E−28 |
| | | | | | 125 (rpIY) | | |
| NO. 516 | BL0856 | 1036138 | 1037562 | complement | nad(p) transhydrogenase subunit | trembl\|U05294\|RR05294_3 | 5.00E−101 |
| | | | | | beta (EC | | |
| NO. 517 | BL0857 | 1037883 | 1039046 | complement | nad(p) transhydrogenase subunit | trembl\|Z92770\|MTCI5_28 | 5.00E−57 |
| | | | | | alpha part 1 (EC | | |
| NO. 518 | BL0858 | 1039387 | 1041498 | + | long-chain-fatty-acid-coa ligase | trembl\|AL021957\|MTV021_21 | 5.00E−115 |
| | | | | | (fadD15) | | |
| NO. 519 | BL0859 | 1041551 | 1042615 | complement | widely conserved gtp-binding | swiss\|O05834\|ERA_MYCTU | 2.00E−77 |
| | | | | | protein (bex) | | |
| NO. 520 | BL0860 | 1042617 | 1044050 | complement | probable conserved integral | swiss\|O05832\|YN66_MYCTU | 4.00E−64 |
| | | | | | memebrane protein | | |
| NO. 521 | BL0861 | 1044126 | 1044674 | complement | conserved hypothetical protein | swiss\|O05831\|YN67_MYCTU | 2.00E−35 |
| | | | | | with duf0054 | | |
| NO. 522 | BL0862 | 1044664 | 1045839 | complement | phob-like protein. | trembl\|AL136534\|SCC117_5 | 2.00E−83 |
| NO. 523 | BL0863 | 1045858 | 1046196 | complement | hypothetical protein in hit family | trembl\|AL136503\|SCC77_15 | 1.00E−28 |
| NO. 524 | BL0864 | 1046245 | 1047042 | complement | conserved hypothetical protein | trembl\|AL136503\|SCC77_19 | 4.00E−28 |
| | | | | | with similarity | | |
| NO. 525 | BL0865 | 1047286 | 1048164 | + | possible trna/rrna | trembl\|AL157953\|SCL11_8 | 3.00E−65 |
| | | | | | methyltransferase (EC | | |
| NO. 526 | BL0866 | 1048365 | 1049609 | + | glucose-1-phosphate | swiss\|O05314\|GLGC_MYCTU | 5.00E−122 |
| | | | | | adenylyltransferase (EC | | |
| NO. 527 | BL0867 | 1049699 | 1050292 | complement | conserved hypothetical protein | trembl\|AL021184\|MTV007_13 | 3.00E−26 |
| | | | | | with duf59 | | |
| NO. 528 | BL0868 | 1050299 | 1050838 | complement | hypothetical protein with nifu-like | trembl\|AL096839\|SCC22_2 | 1.00E−29 |
| | | | | | domain | | |
| NO. 529 | BL0869 | 1050865 | 1052139 | complement | nifs-like aminotranferase | trembl\|AL021184\|MTV007_11 | 5.00E−103 |
| NO. 530 | BL0870 | 1052278 | 1053057 | complement | probable atp binding protein of | trembl\|AL096839\|SCC22_4 | 5.00E−100 |
| | | | | | abc transporter | | |
| NO. 531 | BL0871 | 1053083 | 1054318 | complement | possible abc transporter | trembl\|AL096839\|SCC22_6 | 2.00E−82 |
| | | | | | component | | |
| NO. 532 | BL0872 | 1054324 | 1055823 | complement | possible abc transporter | trembl\|AL096839\|SCC22_7 | 0 |
| | | | | | component | | |
| NO. 533 | BL0874 | 1057888 | 1059549 | complement | ctp synthase (EC 6.3.4.2) (utp- | trembl\|AL109848\|SCI51_16 | 0 |
| | | | | | ammonia ligase) | | |
| NO. 534 | BL0875 | 1059695 | 1060981 | complement | hypothetical protein in the | trembl\|AF008220\|AF008220_96 | 3.00E−33 |
| | | | | | m20/m25/m40 | | |
| NO. 535 | BL0876 | 1061195 | 1061641 | complement | probable 3-dehydroquinate | trembl\|AE001933\|AE001933_1 | 2.00E−33 |
| | | | | | dehydratase (EC | | |
| NO. 536 | BL0877 | 1061805 | 1063427 | complement | bifunctional shikimate kinase (EC | swiss\|Q9X5D2\|AROB_CORGL | 3.00E−91 |
| | | | | | 2.7.1.71)- | | |
| NO. 537 | BL0878 | 1063510 | 1064697 | complement | chorismate synthase (EC 4.6.1.4) | swissnew\|P95013\|AROC_MYCTU | 5.00E−134 |
| NO. 538 | BL0880 | 1065402 | 1066583 | complement | conserved hypothetical protein | tremblnew\|AL445503\|SC2G38_36 | 2.00E−34 |
| | | | | | with duf175 | | |
| NO. 539 | BL0882 | 1067061 | 1069742 | complement | alanyl-trna synthetase (EC | swiss\|O07438\|SYA_MYCTU | 0 |
| | | | | | 6.1.1.7) | | |
| NO. 540 | BL0885 | 1071666 | 1073525 | + | hypothetical protein with unknown | trembl\|U93874\|BSU93874_12 | 5.00E−63 |
| | | | | | function | | |
| NO. 541 | BL0886 | 1073616 | 1074242 | complement | 30s ribosomal protein s4 (rpsD) | trembl\|AF008220\|AF008220_126 | 7.00E−42 |
| NO. 542 | BL0887 | 1074441 | 1075409 | complement | atp binding protein of abc | trembl\|AE001001\|AE001001_4 | 2.00E−36 |
| | | | | | transporter | | |
| NO. 543 | BL0890 | 1077262 | 1079907 | complement | atp-dependent dna helicase pcra | trembl\|Z79700\|MTCY10D7_10 | 0 |
| | | | | | (EC 3.6.1.—) | | |
| NO. 544 | BL0891 | 1080024 | 1080605 | + | xanthine | pironly\|E82984\|E82984 | 1.00E−45 |
| | | | | | phosphoribosyltransferase (EC | | |
| | | | | | 2.42.—) | | |
| NO. 545 | BL0892 | 1080656 | 1082020 | + | xanthine/uracil permease (pbuX) | tremblnew\|AL162755\|NMA4Z2491_{—} | 5.00E−65 |
| | | | | | | 77 | |
| NO. 546 | BL0893 | 1082150 | 1082359 | complement | hypothetical protein with probable | trembl\|AL121854\|SCJ33_10 | 3.00E−23 |
| | | | | | helix turn | | |
| NO. 547 | BL0895 | 1083890 | 1084828 | + | narrowly conserved hypothetical | trembl\|AL138977\|SC7F9_36 | 2.00E−28 |
| | | | | | protein with | | |
| NO. 548 | BL0897 | 1085477 | 1086091 | + | probable | trembl\|U59967\|MT59967_1 | 5.00E−40 |
| | | | | | pyrazinamidase/nicotinamidase | | |
| | | | | | (pncA) | | |
| NO. 549 | BL0901 | 1090564 | 1091640 | complement | probable atp binding protein of | tremblnew\|AP001514\|AP001514_{—} | 2.00E−58 |
| | | | | | abc transporter | 104 | |
| NO. 550 | BL0903 | 1093282 | 1093938 | + | response regulator of two- | trembl\|AL079332\|SCI5_9 | 7.00E−32 |
| | | | | | component system | | |
| NO. 551 | BL0905 | 1094763 | 1095815 | complement | hypothetical protein in pho-4 | swiss\|O34436\|PIT_BACSU | 5.00E−50 |
| | | | | | inorganic | | |
| NO. 552 | BL0906 | 1096190 | 1098589 | complement | carbon starvation protein a (cstA) | swiss\|P95095\|CSTA_MYCTU | 0 |
| NO. 553 | BL0907 | 1098732 | 1100129 | + | possible cyclomaltodextrinase (EC | tremblnew\|AP001517\|AP001517_49 | 2.00E−34 |
| | | | | | 3.2.1.54) or | | |
| NO. 554 | BL0909 | 1100941 | 1103127 | complement | possible atp-dependent rna | gp\|AL159178\|7210999 | 1.00E−93 |
| | | | | | helicase | | |
| NO. 555 | BL0910 | 1103507 | 1104796 | complement | probable purine or uracil permease | gp\|AL159139\|7209210 | 5.00E−107 |
| | | | | | (pyrP) | | |
| NO. 556 | BL0914 | 1107193 | 1108356 | complement | narrowly conserved hypothetical | trembl\|Y17797\|EFY17797_6 | 1.00E−37 |
| | | | | | protein with | | |
| NO. 557 | BL0918 | 1111212 | 1112912 | + | hypothetical protein with probable | swiss\|P71584\|PKNB_MYCTU | 4.00E−23 |
| NO. 558 | BL0919 | 1112950 | 1114440 | complement | possible efflux transporter protein | trembl\|X92946\|LLLPK214_12 | 1.00E−31 |
| NO. 559 | BL0920 | 1114752 | 1116803 | complement | possible efflux transporter protein | trembl\|D50453\|BSD453_85 | 6.00E−96 |
| NO. 560 | BL0926 | 1121476 | 1122570 | complement | widely conserved hypothetical | trembl\|AL021897\|MTV017_64 | 5.00E−125 |
| | | | | | gtpase-like | | |
| NO. 561 | BL0927 | 1122588 | 1123388 | complement | pyrroline-5-carboxylate reductase | swiss\|P27771\|PROC_TREPA | 1.00E−50 |
| | | | | | (EC 1.5.1.2) | | |
| NO. 562 | BL0928 | 1123463 | 1124806 | complement | proline iminopeptidase (EC | trembl\|D61383\|HAD383_1 | 5.00E−103 |
| | | | | | 3.4.11.5) (pip) | | |
| NO. 563 | BL0929 | 1125017 | 1127593 | + | histidine kinase sensor of two- | trembl\|AL049630\|SCE126_8 | 5.00E−36 |
| | | | | | component | | |
| NO. 564 | BL0930 | 1127669 | 1128415 | + | response regulator of two- | trembl\|AL031155\|SC3A7_31 | 2.00E−55 |
| | | | | | component system | | |
| NO. 565 | BL0931 | 1128507 | 1131149 | complement | possible transport protein | trembl\|AL021999\|MTV044_11 | 3.00E−22 |
| NO. 566 | BL0932 | 1131191 | 1131982 | complement | possible atp binding protein of abc | gp\|AL159178\|7211019 | 8.00E−64 |
| | | | | | transporter | | |
| NO. 567 | BL0933 | 1132331 | 1133647 | complement | o-acetylhomoserine (thiol)-lyase | tremblnew\|AP001516\|AP001516_32 | 5.00E−134 |
| | | | | | (EC 4.2.99.10) | | |
| NO. 568 | BL0934 | 1134200 | 1135072 | + | possible pyridoxine kinase (EC | trembl\|AE001176\|AE001176_8 | 1.00E−24 |
| | | | | | 2.7.1.35) | | |
| NO. 569 | BL0936 | 1135870 | 1137405 | + | conserved hypothetical protein in | swiss\|Q10818\|YS97_MYCTU | 5.00E−118 |
| | | | | | chelatase | | |
| NO. 570 | BL0937 | 1137402 | 1139102 | + | hypothetical protein with partial | swiss\|Q10817\|YS96_MYCTU | 5.00E−29 |
| | | | | | similarity to | | |
| NO. 571 | BL0938 | 1139159 | 1141024 | + | succinate dehydrogenase | trembl\|AL021841\|MTV016_16 | 5.00E−137 |
| | | | | | flavoprotein subunit (EC | | |
| NO. 572 | BL0939 | 1141120 | 1142085 | + | probable iorn sulfur protein | trembl\|AL021841\|MTV016_17 | 6.00E−35 |
| | | | | | associated with | | |
| NO. 573 | BL0941 | 1142890 | 1143831 | complement | conserved hypothetical protein | trembl\|X81379\|CGDAPE_2 | 9.00E−61 |
| | | | | | with unknown | | |
| NO. 574 | BL0942 | 1144064 | 1145482 | complement | probable sodium/proton antiporter | trembl\|AL035636\|SCH5_27 | 4.00E−69 |
| | | | | | (nhaA) | | |
| NO. 575 | BL0943 | 1145964 | 1147457 | complement | atp-dependent specificity | trembl\|X95306\|BSCLPXGEN_1 | 5.00E−128 |
| | | | | | component of theclp | | |
| NO. 576 | BL0944 | 1147504 | 1148205 | complement | atp-dependent clp protease | trembl\|AF071885\|AF071885_2 | 7.00E−72 |
| | | | | | proteolytic subunit 2 | | |
| NO. 577 | BL0945 | 1148211 | 1148834 | complement | atp-dependent clp protease | swiss\|O53188\|CLP1_MYCTU | 1.00E−57 |
| | | | | | proteolytic subunit 1 | | |
| NO. 578 | BL0946 | 1149435 | 1150901 | complement | conserved hypothetical protein | trembl\|AF179611\|AF179611_12 | 2.00E−30 |
| | | | | | with unknown | | |
| NO. 579 | BL0947 | 1151085 | 1152464 | complement | trigger factor chaperone (tf) (tig) | swissnew\|O53189\|TIG_MYCTU | 5.00E−79 |
| NO. 580 | BL0948 | 1152519 | 1153820 | complement | narrowly conserved hypothetical | trembl\|AL023702\|SC1C3_16 | 1.00E−75 |
| | | | | | protein with | | |
| NO. 581 | BL0950 | 1154518 | 1155399 | complement | pyruvate formate-lyase 1 | trembl\|AF088897\|AF088897_13 | 9.00E−54 |
| | | | | | activating enzyme (EC | | |
| NO. 582 | BL0951 | 1155509 | 1157923 | complement | formate acetyltransferase (EC | trembl\|AF088897\|AF088897_12 | 0 |
| | | | | | 2.3.1.54) | | |
| NO. 583 | BL0953 | 1158427 | 1160124 | complement | glutamine-dependent nad(+) | trembl\|Y17736\|SCY17736_1 | 5.00E−132 |
| | | | | | synthetase (EC | | |
| NO. 584 | BL0954 | 1160473 | 1161624 | complement | widely conserved hypothetical | swissnew\|O34980\|YTNL_BACSU | 6.00E−75 |
| | | | | | protein with | | |
| NO. 585 | BL0955 | 1161713 | 1162399 | complement | permease protein of abc | trembl\|AE001982\|AE001982_3 | 2.00E−40 |
| | | | | | transporter system | | |
| NO. 586 | BL0956 | 1162396 | 1163601 | complement | atp binding protein of abc | tremblnew\|AP001518\|AP001518_{—} | 8.00E−77 |
| | | | | | transporter | 312 | |
| NO. 587 | BL0957 | 1163735 | 1164715 | complement | hypothetical protein with | swiss\|Q08870\|PLPC_PASHA | 5.00E−36 |
| | | | | | similarity to proteins | | |
| NO. 588 | BL0958 | 1164917 | 1165738 | + | possible had-type hydrolase | trembl\|AF012285\|AF012285_30 | 2.00E−24 |
| NO. 589 | BL0959 | 1165860 | 1168337 | complement | xylulose-5-phosphate/fructose-6- | trembl\|D90917\|SSD917_62 | 0 |
| | | | | | phosphate | | |
| NO. 590 | BL0960 | 1168738 | 1170345 | + | gmp synthase glutamine | gp\|AL161755\|7320904 | 0 |
| | | | | | amidotransferase (guaA) | | |
| NO. 591 | BL0962 | 1170921 | 1172795 | + | hypothetical membrane protein | trembl\|U93874\|BSU93874_12 | 4.00E−61 |
| | | | | | with possible | | |
| NO. 592 | BL0963 | 1172872 | 1173903 | + | ribose-phosphate | trembl\|Z92539\|MTCY10G2_4 | 5.00E−113 |
| | | | | | pyrophosphokinase (EC 2.7.6.1) | | |
| NO. 593 | BL0964 | 1174185 | 1175567 | + | udp-n-acetylglucosamine | trembl\|Z92539\|MTCY10G2_5 | 5.00E−112 |
| | | | | | pyrophosphorylase (EC | | |
| NO. 594 | BL0965 | 1175571 | 1175984 | + | hypothetical protein with duf143 | trembl\|AL136518\|SCC123_15 | 1.00E−27 |
| NO. 595 | BL0966 | 1176166 | 1176864 | + | conserved hypothetical protein | trembl\|AE001959\|AE001959_11 | 2.00E−20 |
| | | | | | with unknown | | |
| NO. 596 | BL0968 | 1177494 | 1179194 | + | phosphate acetyltransferase (EC | swiss\|P96254\|PTA_MYCTU | 3.00E−95 |
| | | | | | 2.3.1.8) | | |
| NO. 597 | BL0969 | 1179329 | 1180558 | + | acetate kinase (EC 2.7.2.1) | swiss\|P77845\|ACKA_CORGL | 5.00E−106 |
| | | | | | (acetokinase) | | |
| NO. 598 | BL0970 | 1180729 | 1182096 | complement | 3-phosphoshikimate 1- | trembl\|AF114233\|AF114233_1 | 2.00E−96 |
| | | | | | carboxyvinyltransferase (EC | | |
| NO. 599 | BL0972 | 1183626 | 1184219 | + | hypothetical protein with site- | trembl\|AL008967\|MTV002_57 | 2.00E−43 |
| | | | | | specific | | |
| NO. 600 | BL0973 | 1184206 | 1185528 | + | probable transposase | trembl\|AL008967\|MTV002_56 | 1.00E−49 |
| NO. 601 | BL0976 | 1186907 | 1188394 | complement | galactoside symporter (lacS) | swissnew\|Q48624\|LACY_LEULA | 5.00E−149 |
| NO. 602 | BL0978 | 1188759 | 1191830 | + | beta-galactosidase (EC 3.2.1.23) | trembl\|AJ242596\|BLO242596_1 | 0 |
| | | | | | (lactase) | | |
| NO. 603 | BL0979 | 1192644 | 1193198 | + | dna-3-methyladenine glycosylase i | trembl\|AJ242596\|BLO242596_2 | 5.00E−108 |
| | | | | | (EC 3.2.2.20) | | |
| NO. 604 | BL0982 | 1194993 | 1197134 | complement | probable glycogen operon protein | gp\|AB031392\|7648481 | 0 |
| | | | | | glgx (EC | | |
| NO. 605 | BL0984 | 1197908 | 1198837 | complement | conserved hypothetical protein | gp\|AL352972\|7619756 | 3.00E−46 |
| | | | | | with duf34 | | |
| NO. 606 | BL0985 | 1198998 | 1201865 | complement | dna polymerase i (EC 2.7.7.7) (pol | swiss\|Q07700\|DPO1_MYCTU | 0 |
| | | | | | i) (polA) | | |
| NO. 607 | BL0986 | 1201911 | 1202696 | complement | conserved hypothetical protein | trembl\|AL109732\|SC7H2_27 | 2.00E−49 |
| | | | | | with a response | | |
| NO. 608 | BL0988 | 1203789 | 1205318 | complement | pyruvate kinase (EC 2.7.1.40) | trembl\|AL109732\|SC7H2_28 | 5.00E−130 |
| NO. 609 | BL0989 | 1205399 | 1206385 | complement | widely conserved hypothetical | trembl\|AL035591\|SCC54_23 | 2.00E−82 |
| | | | | | protein with | | |
| NO. 610 | BL0990 | 1206554 | 1208665 | complement | excinuclease abc subunit b (uvrB) | swiss\|O06150\|UVRB_MYCTU | 0 |
| NO. 611 | BL0991 | 1208677 | 1209294 | complement | hypothetical protein in upf0038 | trembl\|AL109732\|SC7H2_10 | 7.00E−35 |
| NO. 612 | BL0992 | 1209468 | 1210943 | complement | 30s ribosomal protein s1 (rpsA) | trembl\|AL109732\|SC7H2_12 | 0 |
| NO. 613 | BL0993 | 1211063 | 1211941 | complement | bifunctional | trembl\|AL009198\|MTV004_11 | 6.00E−86 |
| | | | | | methylenetetrahydrofolate | | |
| NO. 614 | BL0994 | 1212042 | 1213238 | + | possible solute binding protein of | trembl\|AL583918\|MLEPRTN2_43 | 5.00E−29 |
| | | | | | abc | | |
| NO. 615 | BL0995 | 1213315 | 1214301 | + | atp binding protein of abc | tremblnew\| | 2.00E−27 |
| | | | | | transporter (troB) | AP001511\|AP001511_283 | |
| NO. 616 | BL0996 | 1214368 | 1215201 | + | possible permease of abc | pironly\|F82959\|F82959 | 4.00E−30 |
| | | | | | transporter system | | |
| NO. 617 | BL0997 | 1215253 | 1215777 | complement | 2c-methyl-d-erythritol 2,4- | swissnew\|P96863\|ISPF_MYCTU | 5.00E−30 |
| | | | | | cyclodiphosphate | | |
| NO. 618 | BL0998 | 1215886 | 1216479 | complement | possible transcriptional regulator | trembl\|AL022075\|MTV024_1 | 8.00E−46 |
| NO. 619 | BL0999 | 1216696 | 1218909 | + | 1,4-alpha-glucan branching | swissnew\|Q10625\|GLGB_MYCTU | 0 |
| | | | | | enzyme (glgB) | | |
| NO. 620 | BL1000 | 1218945 | 1219667 | + | response regulator of two- | trembl\|Z95121\|MTY20B11_21 | 3.00E−47 |
| | | | | | component system | | |
| NO. 621 | BL1001 | 1219664 | 1220740 | + | histidine kinase sensor of two- | tremblnew\|AP001513\| | 1.00E−37 |
| | | | | | component system | AP001513_218 | |
| NO. 622 | BL1007 | 1224806 | 1227901 | complement | narrowly conserved hypothetical | trembl\|L22864\|SAWHIB12X_2 | 7.00E−26 |
| | | | | | protein with | | |
| NO. 623 | BL1008 | 1227945 | 1228244 | complement | whib-type transcription regulator | trembl\|AL021840\|MTV015_3 | 8.00E−28 |
| | | | | | (whiB2) | | |
| NO. 624 | BL1009 | 1228495 | 1229928 | + | hypothetical protein with | trembl\|AL023702\|SC1C3_8 | 2.00E−25 |
| | | | | | similarity to putative | | |
| NO. 625 | BL1010 | 1230173 | 1231924 | + | hypothetical protein with | gp\|AL160312\|7242725 | 8.00E−48 |
| | | | | | ftsk/spoiiie domain | | |
| NO. 626 | BL1011 | 1232038 | 1232316 | + | whib-type transcription regulator | trembl\|AJ239087\|SCO239087_1 | 1.00E−28 |
| | | | | | wbIE) | | |
| NO. 627 | BL1012 | 1232389 | 1233921 | complement | histidine kinase-like protein | trembl\|Z95120\|MTCY7D11_18 | 7.00E−80 |
| NO. 628 | BL1014 | 1235063 | 1235881 | + | conserved hypothetical protein | trembl\|AB003158\|AB003158_1 | 5.00E−33 |
| | | | | | with unknown | | |
| NO. 629 | BL1015 | 1235936 | 1236415 | complement | transcription elongation factor | tremblnew\|AL451182\|SCK13_13 | 2.00E−31 |
| | | | | | grea (transcript | | |
| NO. 630 | BL1016 | 1236514 | 1236921 | complement | fk506-binding protein (peptidyl- | pironly\|S46228\|S46228 | 2.00E−25 |
| | | | | | prolyl cis-trans | | |
| NO. 631 | BL1017 | 1237063 | 1239282 | complement | 1-serine dehydralase (EC 4.2.1.13) | swiss\|O86564\|SDHL_STRCO | 5.00E−136 |
| | | | | | (1-serine | | |
| NO. 632 | BL1019 | 1239669 | 1240670 | complement | possible exopolyphosphatase-like | trembl\|Z92539\|MTCY10G2_13 | 3.00E−57 |
| | | | | | protein | | |
| NO. 633 | BL1020 | 1240733 | 1241299 | complement | hypothetical protein with unknown | trembl\|Z92539\|MTCY10G2_12 | 1.00E−30 |
| | | | | | function | | |
| NO. 634 | BL1022 | 1241998 | 1243296 | complement | enolase (EC 4.2.1.11) (2- | swiss\|P37869\|ENO_BACSU | 5.00E−143 |
| | | | | | phosphoglycerate | | |
| NO. 635 | BL1023 | 1243447 | 1244394 | complement | possible oxidoreductase in aldo- | trembl\|AE002028\|AE002028_7 | 9.00E−33 |
| | | | | | keto reductase | | |
| NO. 636 | BL1025 | 1244534 | 1248118 | complement | transcription-repair coupling | swiss\|P96380\|MFD_MYCTU | 0 |
| | | | | | factor (mfd) | | |
| NO. 637 | BL1026 | 1248108 | 1248707 | complement | peptidyl-trna hydrolase (EC | swiss\|P96386\|PTH_MYCTU | 2.00E−36 |
| | | | | | 3.1.1.29) (pth) | | |
| NO. 638 | BL1028 | 1250516 | 1251013 | complement | possible n-acetyl transferase | trembl\|AE001967\|AE001967_8 | 1.00E−21 |
| NO. 639 | BL1029 | 1251136 | 1254336 | complement | narrowly conserved hypothetical | trembl\|AL021646\|MTV014_38 | 5.00E−154 |
| | | | | | protein with | | |
| NO. 640 | BL1031 | 1254509 | 1255711 | + | hypothetical protein in glycosyl | trembl\|AL021929\|MTV034_1 | 2.00E−21 |
| | | | | | hyrolase family | | |
| NO. 641 | BL1032 | 1255809 | 1256594 | complement | possible nicotinate-nucleotide | trembl\|AL136518\|SCC123_17 | 3.00E−69 |
| NO. 642 | BL1034 | 1257169 | 1258581 | complement | gamma-glutamyl phosphate | trembl\|AL136518\|SCC123_23 | 5.00E−117 |
| | | | | | reductase (gpr) (EC | | |
| NO. 643 | BL1035 | 1258586 | 1259287 | complement | serine hydroxymethyltransferase | swiss\|O53441\|GLA1_MYCTU | 1.00E−40 |
| | | | | | (glyA) | | |
| NO. 644 | BL1036 | 1259510 | 1261000 | + | threonine synthase (EC 4.2.99.2) | swiss\|Q42598\|THRC_SCHPO | 7.00E−73 |
| | | | | | (thrC) | | |
| NO. 645 | BL1038 | 1261520 | 1264306 | + | possible calcium-transporting | trembl\|AE000873\|E000873_1 | 5.00E−149 |
| | | | | | atpase 10, plasma | | |
| NO. 646 | BL1041 | 1265818 | 1266738 | complement | atp binding protein of abc | tremblnew\|AP001509\|AP001509_90 | 5.00E−52 |
| | | | | | transporter | | |
| NO. 647 | BL1041a | 1266760 | 1267134 | complement | possible gntr-family | tremblnew\|AP001509\|AP001509_89 | 3.00E−25 |
| | | | | | transcriptional regulator | | |
| NO. 648 | BL1043 | 1268017 | 1269819 | complement | dna repair protein recn | swissnew\|Q9S220\|RECN_STRCO | 2.00E−81 |
| | | | | | (recombination protein | | |
| NO. 649 | BL1044 | 1269819 | 1270847 | complement | widely conserved hypothetical | trembl\|AL109848\|SCI51_21 | 4.00E−59 |
| | | | | | protein with | | |
| NO. 650 | BL1045 | 1271094 | 1272560 | + | hypothetical protein possibly | trembl\|Z99119\|BSUB0016_183 | 2.00E−57 |
| | | | | | involved in | | |
| NO. 651 | BL1046 | 1272611 | 1273273 | + | hypothetical protein possibly | tremblnew\|AP001509\|AP001509_35 | 6.00E−31 |
| | | | | | involved in | | |
| NO. 652 | BL1048 | 1274067 | 1274909 | complement | hemolysin-like protein with s4 | gp\|AJ271681\|7340781 | 4.00E−47 |
| | | | | | domain found in | | |
| NO. 653 | BL1049 | 1275097 | 1276137 | complement | conserved hypothetical protein | trembl\|AL109848\|SCI51_28 | 1.00E−59 |
| | | | | | with possible | | |
| NO. 654 | BL1050 | 1276146 | 1277933 | complement | hypothetical protein with unknown | trembl\|Z98268\|MTCI125_12 | 2.00E−27 |
| | | | | | function | | |
| NO. 655 | BL1051 | 1277961 | 1279283 | complement | tyrosyl-trna synthetase (EC | trembl\|AL132644\|SC18_3 | 5.00E−122 |
| | | | | | 6.1.1.1) | | |
| NO. 656 | BL1054 | 1281281 | 1282090 | complement | thiamine biosynthesis protein | trembl\|AE000735\|AE000735_1 | 4.00E−81 |
| | | | | | (thiF) | | |
| NO. 657 | BL1055 | 1282167 | 1283036 | complement | thiamine biosynthesis protein | trembl\|AL139077\|CJ11168X4_37 | 2.00E−76 |
| | | | | | (thiG) | | |
| NO. 658 | BL1057 | 1283591 | 1285063 | complement | argininosuccinate lyase (EC | trembl\|AL157956\|SCL24_6 | 5.00E−162 |
| | | | | | 4.3.2.1) | | |
| NO. 659 | BL1058 | 1285509 | 1286747 | complement | argininosuccinate (EC | swiss\|P50986\|ASSY_STRCL | 5.00E−152 |
| | | | | | 6.3.4.5) | | |
| NO. 660 | BL1059 | 1286830 | 1287342 | complement | arginine repressor-like protein | trembl\|AL157956\|SCL24_12 | 3.00E−28 |
| | | | | | (argR) | | |
| NO. 661 | BL1060 | 1287339 | 1288304 | complement | ornithine carbamoyltransferase, | swiss\|P94991\|OTCA_MYCTU | 6.00E−96 |
| | | | | | anabolic (EC | | |
| NO. 662 | BL1061 | 1288348 | 1289643 | complement | acetylornithine aminotransferase | trembl\|AL157956\|SCL24_13 | 3.00E−85 |
| | | | | | (EC 2.6.1.11) | | |
| NO. 663 | BL1062 | 1289633 | 1290589 | complement | acetylglutamate kinase (EC | swiss\|Q59281\|ARGB_CORGL | 1.00E−93 |
| | | | | | 2.7.2.8) (nag kinase) | | |
| NO. 664 | BL1063 | 1290661 | 1291836 | complement | glutamate n-acetyltransferase (EC | gp\|Z49111\|7328263 | 4.00E−91 |
| | | | | | 2.3.1.35) | | |
| NO. 665 | BL1064 | 1291833 | 1292927 | complement | n-acetyl-gamma-glutamyl- | swiss\|P54895\|ARGC_STRCO | 5.00E−88 |
| | | | | | phosphate reductase (EC | | |
| NO. 666 | BL1066 | 1293743 | 1296352 | complement | phenylalanyl-trna synthetase beta | swissnew\|O88054\|SYFB_STRCO | 5.00E−173 |
| | | | | | chain (EC | | |
| NO. 667 | BL1067 | 1296360 | 1297427 | complement | phenylalanyl-trna synthetase alpha | swissnew\|P94984\|SYFA_MYCTU | 5.00E−100 |
| | | | | | chain (EC | | |
| NO. 668 | BL1068 | 1297481 | 1298365 | complement | possible rma methylase | trembl\|AL031541\|SC135_19 | 6.00E−33 |
| NO. 669 | BL1070 | 299379 | 1300782 | complement | atp binding protein of abc | trembl\|AJ002571\|BSAJ2571_41 | 3.00E−70 |
| | | | | | transporter | | |
| NO. 670 | BL1072 | 1301753 | 1303120 | complement | widely conserved protein in | trembl\|AL021185\|MTV009_7 | 5.00E−94 |
| | | | | | peptidase or | | |
| NO. 671 | BL1074 | 1303982 | 1305472 | + | dihydrolipoamide dehydrogenase | trembl\|L38646\|SEFORA_2 | 5.00E−76 |
| | | | | | (EC 1.8.1.4) | | |
| NO. 672 | BL1076 | 1306658 | 1308094 | + | glutamine synthetase 1 (EC | tremblnew\|AX063815\|AX063815_1 | 0 |
| | | | | | 6.3.1.2) | | |
| NO. 673 | BL1077 | 1308172 | 1308276 | complement | fragment of beta-glucuronidase | trembl\|AF305888\|AF305888_3 | 5.00E−20 |
| NO. 674 | BL1079 | 1309870 | 1310070 | + | fragment of laca | swissnew\|P07464\|THGA_ECOLI | 1.00E−22 |
| NO. 675 | BL1080 | 1310080 | 1310754 | complement | galactoside o-acetyltransferase | tremblnew\|AE005213\|AE005213_7 | 2.00E−47 |
| | | | | | (EC 2.3.1.18) | | |
| NO. 676 | BL1081 | 1310916 | 1311608 | complement | possible endonuclease iii | trembl\|U67584\|MJU67584_8 | 2.00E−30 |
| NO. 677 | BL1082 | 1311616 | 1312974 | complement | conserved hypothetical | tremblnew\|AP001514\| | 9.00E−62 |
| | | | | | transmembrane protein in | AP001514_169 | |
| NO. 678 | BL1083 | 1313032 | 1315629 | complement | excinuclease abc subunit a-like | trembl\|AL133469\|SCM10_6 | 5.00E−145 |
| | | | | | protein | | |
| NO. 679 | BL1090 | 1322865 | 1323908 | complement | possible alcohol dehydrogenase | trembl\|U95372\|U95372_2 | 6.00E−93 |
| NO. 680 | BL1094 | 1325764 | 1326828 | complement | conserved hypothetical protein | swiss\|P33019\|YEIH_ECOLI | 2.00E−31 |
| | | | | | with unknown | | |
| NO. 681 | BL1097 | 1328892 | 1330130 | complement | elongation factor tu (ef-tu) (tuf) | swiss\|P31501\|EFTU_MYCTU | 5.00E−173 |
| NO. 682 | BL1098 | 1330264 | 1332387 | complement | elongation factor g (ef-g) (fusA) | swiss\|O53790\|EFG_MYCTU | 0 |
| NO. 683 | BL1099 | 1332419 | 1332889 | complement | 30s ribosomal protein s7. (rpsG) | trembl\|L34681\|MSRPSLG_2 | 4.00E−64 |
| NO. 684 | BL1100 | 1332895 | 1333266 | complement | ribosomal protein s12 (rpsL) | swissnew\|P97222\|RS12_STRCO | 4.00E−55 |
| NO. 685 | BL1102 | 1334032 | 1335093 | complement | probable na+ dependent | trembl\|AF027868\|AF027868_63 | 5.00E−64 |
| | | | | | transporter possibly for | | |
| NO. 686 | BL1103 | 1335655 | 1336680 | + | possible low specificity-threonine | trembl\|AE001274\|AE001274_45 | 3.00E−68 |
| | | | | | aldolase | | |
| NO. 687 | BL1104 | 1336827 | 1337987 | complement | possible glycosyltransferase | trembl\|AE001525\|AE001525_12 | 2.00E−61 |
| NO. 688 | BL1105 | 1338155 | 1339498 | + | probable | pironly\|B83176\|B83176 | 3.00E−83 |
| | | | | | phosphoribosylglycinamide | | |
| NO. 689 | BL1107 | 1339891 | 1340643 | + | phosphoribosylaminoimidazole- | tremblnew\|AP001509\|AP001509_64 | 8.00E−68 |
| | | | | | succinocarboxamide | | |
| NO. 690 | BL1108 | 1340706 | 1344440 | + | phosphoribosylformyl- | trembl\| | 5.00E−50 |
| | | | | | glycinamidine | U32759\|HI32759_4 | |
| | | | | | synthase (EC | | |
| NO. 691 | BL1109 | 1344331 | 1345875 | + | possible carboxylesterases or | tremblnew\|AL512977\|SSOLP2N16_{—} | 1.00E−30 |
| | | | | | lipases. | 40 | |
| NO. 692 | BL1111 | 1347888 | 1349402 | complement | possible na(+)/h(+) antiporter | pironly\|G81187\|G81187 | 5.00E−25 |
| | | | | | (sodium/proton | | |
| NO. 693 | BL1113 | 1350694 | 1351671 | + | hypothetical protein in aldo/keto | trembl\|AE002063\|AE002063_8 | 6.00E−71 |
| | | | | | reductase 2 | | |
| NO. 694 | BL1114 | 1351920 | 1353515 | complement | hypothetical protein in | trembl\|AF188935\|AF188935_69 | 1.00E−34 |
| | | | | | impb/mucb/samb family of | | |
| NO. 695 | BL1115 | 1353674 | 1355176 | + | adenosylhomocysteinase (EC | trembl\|AP000060\|AP000060_91 | 3.00E−61 |
| | | | | | 3.3.1.1) | | |
| NO. 696 | BL1116 | 1355216 | 1356589 | + | possible chlorohydrolase-like | swiss\|O29265\|Y997_ARCFU | 1.00E−21 |
| | | | | | protein | | |
| NO. 697 | BL1119 | 1358229 | 1359191 | + | probable permease protein for abc | trembl\|AE001090\|AE001090_13 | 4.00E−28 |
| | | | | | transporter | | |
| NO. 698 | BL1120 | 1359188 | 1359973 | + | probable atp binding protein of | trembl\|AE001058\|AE001058_14 | 7.00E−67 |
| | | | | | abc transporter | | |
| NO. 699 | BL1121 | 1360377 | 1361888 | + | amidophosphoribosyltransferase | trembl\|U64311\|U64311_5 | 0 |
| | | | | | precursor (EC | | |
| NO. 700 | BL1122 | 1361954 | 1363045 | + | phosphoribosylformyl- | tremblnew\|AP001509\|AP001509_69 | 5.00E−123 |
| | | | | | glycinamidine | | |
| | | | | | cyclo-ligase | | |
| NO. 701 | BL1123 | 1363072 | 1364340 | + | phosphoribosylamine-glycine | swiss\|Q9ZF44\|PUR2_LACLA | 5.00E−130 |
| | | | | | ligase (EC | | |
| NO. 702 | BL1124 | 1364714 | 1366351 | complement | fatty aldehyde dehydrogenase (EC | gp\|AE003841\|7304213 | 9.00E−81 |
| | | | | | 1.2.1.3) | | |
| NO. 703 | BL1125 | 1366472 | 1368547 | complement | hypothetical protein with | trembl\|AB010970\|AB010970_8 | 2.00E−80 |
| | | | | | similarity to orf7 | | |
| NO. 704 | BL1128 | 1370243 | 1370683 | complement | probable metal uptake regulator | trembl\|AL137166\|SCC121_11 | 6.00E−31 |
| | | | | | similar to | | |
| NO. 705 | BL1129 | 1370680 | 1371858 | complement | phosphoribosylaminoimidazole | trembl\|AJ000883\|LLJ000883_4 | 5.00E−102 |
| | | | | | carboxylase atpase | | |
| NO. 706 | BL1130 | 1371842 | 1372348 | complement | phosphoribosylaminoimidazole | swiss\|P12044\|PUR6_BACSU | 9.00E−58 |
| | | | | | carboxylase | | |
| NO. 707 | BL1131 | 1372444 | 1373436 | complement | nadph: quinone oxidoreductases or | trembl\|U75363\|RPU75363_7 | 4.00E−42 |
| | | | | | alcohol | | |
| NO. 708 | BL1132 | 1373475 | 1375799 | + | probable I-deoxyxylulose-5- | swiss\|P26242\|DXS_RHOCA | 1.00E−71 |
| | | | | | phosphate synthase | | |
| NO. 709 | BL1135 | 1378547 | 1379302 | complement | atp binding protein of abc | trembl\|AE001033\|AE001033_4 | 3.00E−56 |
| | | | | | transporter | | |
| NO. 710 | BL1137 | 1380999 | 1382000 | complement | protein similar to hex regulon | tremblnew\|AL450223\|SC7H9_11 | 5.00E−34 |
| | | | | | repressor | | |
| NO. 711 | BL1138 | 1381966 | 1384275 | + | alpha-1-arabinofuranosidase a (EC | trembl\|U15178\|BO15178_1 | 3.00E−70 |
| | | | | | 3.2.1.55) | | |
| NO. 712 | BL1140 | 1384741 | 1385928 | complement | possible transport protein | swiss\|P75788\|YBIR_ECOLI | 3.00E−27 |
| NO. 713 | BL1142 | 1386478 | 1387410 | complement | 1-asparaginase precursor (EC | swiss\|P37595\|ASGX_ECOLI | 3.00E−49 |
| | | | | | 3.5.1.1) | | |
| NO. 714 | BL1144 | 1387766 | 1389430 | complement | probable multiple substrate | trembl\|AB027131\|AB027131_1 | 4.00E−72 |
| | | | | | aminotransferase | | |
| NO. 715 | BL1145 | 1389488 | 1390126 | complement | conserved hypothetical protein in | trembl\|AL137778\|SC12_12 | 5.00E−38 |
| | | | | | sno glutamine | | |
| NO. 716 | BL1146 | 1390212 | 1391183 | complement | widely conserved protein in | swiss\|P45293\|YG47_HAEIN | 5.00E−125 |
| | | | | | upfoo19 probably | | |
| NO. 717 | BL1147 | 1391279 | 1393387 | complement | dna primase (EC 2.7.7.—) (dnaG) | swissnew\|O52200\|PRIM_MYCSM | 5.00E−125 |
| NO. 718 | BL1148 | 1393551 | 1394978 | complement | deoxyguanosinetriphosphate | trembl\|AL137187\|SC7A8_9 | 5.00E−108 |
| | | | | | triphosphohydrolase | | |
| NO. 719 | BL1149 | 1395030 | 1396388 | complement | alanine racemase (EC 5.1.1.1) | swiss\|O86786\|ALR_STRCO | 6.00E−87 |
| | | | | | (alr) | | |
| NO. 720 | BL1150 | 1396601 | 1398037 | + | probable amino acid transporter | trembl\|Z99109\|BSUB0006_21 | 5.00E−150 |
| | | | | | (yfnA) | | |
| NO. 721 | BL1152 | 1399009 | 1399428 | complement | autoinducer-2 production protein | swissnew\|Q9XDU6\|LUXS_CLOPE | 2.00E−24 |
| | | | | | luxs (ai-2 | | |
| NO. 722 | BL1153 | 1399616 | 1401571 | complement | atp-dependent dna helicase recq | trembl\|AF027868\|AF027868_53 | 5.00E−117 |
| | | | | | (EC 3.6.1.—) | | |
| NO. 723 | BL1155 | 1403593 | 1404777 | complement | cystathionine gamma-synthase | swiss\|P46807\|METB_MYCLE | 5.00E−126 |
| | | | | | (EC 4.2.99.9) (cgs) | | |
| NO. 724 | BL1156 | 1404869 | 1406095 | complement | cystathionine beta-synthase (EC | tremblnew\|AF319543\|AF319543_2 | 5.00E−121 |
| | | | | | 4.2.1.22) | | |
| NO. 725 | BL1157 | 1406422 | 1407207 | complement | probable atp binding protein of | tremblnew\|AE005342\|AE005342_4 | 4.00E−41 |
| | | | | | abc transporter | | |
| NO. 726 | BL1158 | 1407200 | 1407991 | complement | probable atp-binding protein of | trembl\|AJ248288\|CNSPAX06_207 | 4.00E−47 |
| | | | | | abc transporter | | |
| NO. 727 | BL1159 | 1407988 | 1408890 | complement | probable abc transporter permease | tremblnew\|AP001507\|AP001507_30 | 1.00E−33 |
| | | | | | protein for | | |
| NO. 728 | BL1160 | 1408887 | 1409864 | complement | probable abc transporter permease | trembl\|AE000548\|AE000548_6 | 5.00E−46 |
| | | | | | protein for | | |
| NO. 729 | BL1161 | 1409929 | 1411548 | complement | solute binding protein of abc | trembl\|AP000003\|AP000003_207 | 8.00E−39 |
| | | | | | transporter | | |
| NO. 730 | BL1162 | 1411674 | 1412444 | + | conserved hypothetical protein | tremblnew\|AP001507\|AP001507_86 | 6.00E−52 |
| | | | | | with unknown | | |
| NO. 731 | BL1163 | 1412504 | 1413880 | complement | probable solute binding protein of | trembl\|AL158061\|SC6D11_4 | 7.00E−79 |
| | | | | | abc | | |
| NO. 732 | BL1164 | 1414041 | 1415384 | complement | probable solute binding protein of | trembl\|AL158061\|SC6D11_4 | 5.00E−108 |
| | | | | | abc | | |
| NO. 733 | BL1165 | 1415716 | 1417068 | complement | probable solute binding protein of | trembl\|AL158061\|SC6D11_4 | 5.00E−100 |
| | | | | | abc | | |
| NO. 734 | BL1166 | 1417228 | 1418928 | + | alpha-I-arabinofuranosidase a (EC | gp\|AL163003\|7414545 | 5.00E−126 |
| | | | | | 3.2.1.55) | | |
| NO. 735 | BL1167 | 1419048 | 1420085 | complement | laci-type transcriptional regulator | trembl\|AE001777\|AE001777_1 | 2.00E−44 |
| NO. 736 | BL1168 | 1420186 | 1422261 | complement | beta-galactosidase i (EC 3.2.1.23) | trembl\|AL158061\|SC6D11_3 | 0 |
| | | | | | (lactase) | | |
| NO. 737 | BL1169 | 1422476 | 1423486 | complement | probable permease of abc | trembl\|AL158061\|SC6D11_5 | 5.00E−116 |
| | | | | | transporter system for | | |
| NO. 738 | BL1170 | 1423542 | 1424474 | complement | probable permease of abc | trembl\|AL158061\|SC6D11_6 | 5.00E−102 |
| | | | | | transporter system for | | |
| NO. 739 | BL1171 | 1424691 | 1425701 | + | probable laci-type transcriptional | trembl\|AL158061\|SC6D11_7 | 2.00E−68 |
| | | | | | regulator | | |
| NO. 740 | BL1173 | 1426727 | 1427410 | + | hypothetical protein with | swiss\|P55564\|Y4ME_RHISN | 2.00E−26 |
| | | | | | similarity to hipa | | |
| NO. 741 | BL1174 | 1427453 | 1428154 | complement | possible ribosomal pseudouridine | trembl\|Z96070\|MTCI418A_2 | 1.00E−44 |
| | | | | | synthase | | |
| NO. 742 | BL1175 | 1428231 | 1430123 | complement | glucosamine-fructose-6- | trembl\|AL031317\|SC6G4_18 | 0 |
| | | | | | phosphate | | |
| NO. 743 | BL1176 | 1430365 | 1431195 | complement | atp binding protein of abc | tremblnew\|AF312768\|AF312768_3 | 1.00E−77 |
| | | | | | transporter | | |
| NO. 744 | BL1177 | 1431211 | 1432194 | complement | permease protein of abc | trembl\|AF104994\|AF104994_2 | 7.00E−59 |
| | | | | | transporter system | | |
| NO. 745 | BL1178 | 1432325 | 1433266 | complement | probable solute binding protein of | trembl\|AF104994\|AE104994_1 | 3.00E−38 |
| | | | | | abc | | |
| NO. 746 | BL1179 | 1433400 | 1434464 | complement | probable solute binding protein of | trembl\|AF104994\|AF104994_1 | 5.00E−39 |
| | | | | | abc | | |
| NO. 747 | BL1180 | 1434516 | 1435115 | complement | ssra-binding protein(smpB) | trembl\|AL138851\|SCE59_25 | 7.00E−52 |
| NO. 748 | BL1182 | 1436620 | 1437543 | complement | ftsx-like protein involved in cell | trembl\|AL138851\|SCE59_27 | 3.00E−46 |
| | | | | | division | | |
| NO. 749 | BL1183 | 1437555 | 1438724 | complement | ftse-like atp binding protein | trembl\|AL138851\|SCE59_28 | 1.00E−80 |
| | | | | | involved in cell | | |
| NO. 750 | BL1184 | 1438733 | 1439857 | complement | peptide chain release factor 2 (rf- | trembl\|AL138851\|SCE59_31 | 5.00E−129 |
| | | | | | 2) (prfB) | | |
| NO. 751 | BL1186 | 1441718 | 1442371 | complement | polypeptide deformylase (EC | trembl\|AL133422\|SCM1_15 | 5.00E−45 |
| | | | | | 3.5.1.31) (pdf) | | |
| NO. 752 | BL1187 | 1442396 | 1443781 | complement | probable phosphoglucomutase or | trembl\|AL031317\|SC6G4_14 | 5.00E−129 |
| NO. 753 | BL1190 | 1444761 | 1445648 | complement | hypothetical transmembrane | trembl\|U00011\|ML011_29 | 2.00E−22 |
| | | | | | protein with unknown | | |
| NO. 754 | BL1191 | 1445826 | 1448435 | complement | aminopeptidase n ec 3.4.11.2) | trembl\|AL138662\|SC8E4A_13 | 0 |
| | | | | | (lysyl | | |
| NO. 755 | BL1192 | 1448477 | 1450390 | complement | widely conserved hypothetical | trembl\|AL031260\|SC9A10_9 | 0 |
| | | | | | protein with | | |
| NO. 756 | BL1193 | 1450412 | 1451317 | complement | dihydrodipicolinate synthase (EC | trembl\|AL008967\|MTV002_18 | 1.00E−64 |
| | | | | | 4.2.1.52) | | |
| NO. 757 | BL1194 | 1451480 | 1452235 | complement | dihydrodipicolinate reductase (EC | trembl\|AL008967\|MTV002_38 | 1.00E−68 |
| | | | | | 1.3.1.26) | | |
| NO. 758 | BL1195 | 1452571 | 1453890 | complement | possible transport protein | pironly\|D83363\|D83363 | 6.00E−42 |
| NO. 759 | BL1196 | 1454102 | 1458133 | complement | widely conserved atp-dependent | trembl\|AL021646\|MTV014_46 | 4.00E−71 |
| | | | | | dna helicase; | | |
| NO. 760 | BL1198 | 1462572 | 1463993 | + | probable serine/threonine-protein | trembl\|Z83866\|MTCY22D7_29 | 9.00E−35 |
| | | | | | kinase (EC | | |
| NO. 761 | BL1199 | 1464160 | 1470144 | + | large protein with c-terminal | tremblnew\|AE007470\|AE007470_2 | 2.00E−21 |
| | | | | | fibronectin type | | |
| NO. 762 | BL1199a | 1470155 | 1471528 | + | methanol dehydrogenase | trembl\|AP001509\|AP001509_42 | 2.00E−43 |
| | | | | | regulatory protein | | |
| NO. 763 | BL1202 | 1475283 | 1476215 | + | probable phosphoprotein | trembl\|AL079308\|SCH69_15 | 1.00E−23 |
| | | | | | phosphatase (ppp) | | |
| NO. 764 | BL1204 | 1477564 | 1481601 | complement | dna-directed rna polymerase beta | swiss\|P47769\|RPOC_MYCTU | 0 |
| | | | | | prime chain (EC | | |
| NO. 765 | BL1205 | 1481769 | 1485332 | complement | dna-directed rna polymerase beta | gp\|AL160431\|7248348 | 0 |
| | | | | | chain (EC | | |
| NO. 766 | BL1207 | 1486274 | 1487260 | complement | probable a/g-specific adenine | trembl\|AL049628\|SCE94_6 | 2.00E−64 |
| | | | | | glycosylase | | |
| NO. 767 | BL1208 | 1487434 | 1487943 | + | probable rna methyltransferase | trembl\|AL009198\|MTV004_21 | 2.00E−40 |
| | | | | | (EC 2.1.1.—) | | |
| NO. 768 | BL1209 | 1488250 | 1489614 | complement | narrowly conserved hypothetical | tremblnew\|AL162757\|NMA6Z2491_{—} | 5.00E−161 |
| | | | | | protein with | 172 | |
| NO. 769 | BL1210 | 1490105 | 1491355 | complement | galactokinase (EC 2.7.1.6) | swissnew\|P96910\|GAL1_MYCTU | 4.00E−62 |
| | | | | | (galactose kinase) | | |
| NO. 770 | BL1211 | 1491372 | 1492622 | complement | galactose-1-phosphate | trembl\|AF135398\|AF135398_6 | 1.00E−40 |
| | | | | | uridylyltransferase (EC | | |
| NO. 771 | BL1212 | 1492615 | 1493511 | complement | probable deor-type transcriptional | swiss\|O05261\|YULB_BACSU | 9.00E−32 |
| | | | | | regulator. | | |
| NO. 772 | BL1213 | 1493920 | 1494936 | + | dihydroorotate dehydrogenase | swissnew\|P74782\|PYRD_SYNY3. | 3.00E−44 |
| | | | | | (EC 1.3.3.1) | | |
| NO. 773 | BL1214 | 1495104 | 1496219 | complement | probable nadh-dependent flavin | tremblnew\|AL445503\|SC2G38_2 | 5.00E−96 |
| | | | | | oxidoreductase | | |
| NO. 774 | BL1215 | 1496669 | 1498984 | complement | possible penicillin-binding protein | trembl\|AL079353\|SCH17_14 | 3.00E−67 |
| NO. 775 | BL1216 | 1499088 | 1499807 | complement | probable transcriptional regulator | trembl\|AL079353\|SCH17_5 | 3.00E−50 |
| | | | | | with cyclic | | |
| NO. 776 | BL1217 | 1500046 | 1501131 | complement | probable lipoate protein ligase | trembl\|AJ224512\|SNO224512_16 | 3.00E−67 |
| | | | | | (snoP) | | |
| NO. 777 | BL1218 | 1501189 | 1502220 | complement | 3-isopropylmalate dehydrogenase | swiss\|P94631\|LEU3_CORGL | 5.00E−114 |
| | | | | | (EC 1.1.1.85) | | |
| NO. 778 | BL1219 | 1502285 | 1504801 | complement | protease ii (EC 3.4.21.83) | trembl\|Z80226\|MTCY369_27 | 6.00E−94 |
| | | | | | (oligopeptidase b) | | |
| NO. 779 | BL1220 | 1504862 | 1506202 | complement | narrowly conserved hypothetical | trembl\|AE001968\|AE001968_4 | 3.00E−21 |
| | | | | | protein with | | |
| NO. 780 | BL1221 | 1506260 | 1506673 | complement | glycine cleavage system h protein | swissnew\|O86566\|GCSH_STRCO | 3.00E−27 |
| | | | | | (gcvH) | | |
| NO. 781 | BL1222 | 1506699 | 1507991 | complement | #NAME? | swissnew\|O53345\|NUDC_MYCTU | 1.00E−34 |
| NO. 782 | BL1224 | 1508984 | 1509616 | complement | narrowly conserved hypothetical | emnew\|AL353870\|SC6F7 | 5.00E−50 |
| | | | | | protein with | | |
| NO. 783 | BL1226 | 1509814 | 1510185 | + | thioredoxin (trxA2) | trembl\|AL133422\|SCM1_17 | 1.00E−26 |
| NO. 784 | BL1229 | 1513262 | 1514698 | complement | possible etk-like tyrosine kinase | trembl\|Z99122\|BSUB0019_122 | 6.00E−32 |
| | | | | | involved in | | |
| NO. 785 | BL1234 | 1517948 | 1519267 | + | hypothetical protein with | trembl\|U94520\|LLU94520_1 | 3.00E−27 |
| | | | | | similarity to abili: | | |
| NO. 786 | BL1239 | 1522841 | 1523209 | complement | hypothetical protein in the | swissnew\|Q99338\|ISTB_BACTB | 2.00E−22 |
| | | | | | is21/is1162 | | |
| NO. 787 | BL1244 | 1528511 | 1529758 | complement | dtdp-glucose 4,6-dehydratase (EC | trembl\|AF071085\|AF071085_9 | 5.00E−121 |
| | | | | | 4.2.1.46) | | |
| NO. 788 | BL1245 | 1529912 | 1531090 | + | probable udp-galactopyranose | trembl\|AF026540\|AF026540_1 | 5.00E−124 |
| | | | | | mutase (EC | | |
| NO. 789 | BL1247 | 1532596 | 1533474 | + | possible 2-hydroxyhepta-2,4- | trembl\|AL031124\|SC1C2_27 | 6.00E−53 |
| | | | | | diene-1,7-dioate | | |
| NO. 790 | BL1248 | 1533720 | 1534595 | complement | iclr-type transcriptional regulator | pironly\|B83207\|B83207 | 9.00E−26 |
| NO. 791 | BL1249 | 1534841 | 1536394 | + | histidine ammonia-lyase (EC | tremblnew\|AL512667\|SC2K31_9 | 5.00E−164 |
| | | | | | 4.3.1.3) (histidase) | | |
| NO. 792 | BL1250 | 1536613 | 1539282 | + | protease of clpa/clpb type (clpB) | trembl\|AL049754\|SCH10_39 | 0 |
| NO. 793 | BL1251 | 1539399 | 1540538 | + | probable glutamyl-trna synthetase | pironly\|C81210\|C81210 | 4.00E−45 |
| | | | | | (EC 6.1.1.17) | | |
| NO. 794 | BL1253 | 1541869 | 1542348 | complement | hypothetical protein with dufl 63 | trembl\|D78193\|BSGNTZA_15 | 1.00E−45 |
| NO. 795 | BL1254 | 1542396 | 1543022 | complement | uracil phosphoribosyltransferase | tremblnew\|AP001519\| | 1.00E−52 |
| | | | | | (EC 2.4.2.9) | AP001519_279 | |
| NO. 796 | BL1258 | 1545721 | 1546935 | complement | probable mutt1 protein (mutT1) | trembl\|Z83018\|MTCY349_36 | 1.00E−28 |
| NO. 797 | BL1259 | 1547078 | 1549315 | complement | polyphosphate kinase (EC 2.7.4.1) | gp\|AL353816\|7636018 | 0 |
| NO. 798 | BL1261 | 1551240 | 1552016 | complement | iclr-type transcriptional regulator | trembl\|AL031124\|SC1C2_33 | 3.00E−82 |
| NO. 799 | BL1262 | 1552334 | 1553737 | + | 3-isopropylmalate dehydratase | trembl\|AL031124\|SC1C2_34 | 0 |
| | | | | | large subunit (EC | | |
| NO. 800 | BL1263 | 1553820 | 1554512 | + | 3-isopropylmalate dehydratase | swiss\|O33124\|LEUD_MYCLE | 9.00E−64 |
| | | | | | small subunit (EC | | |
| NO. 801 | BL1266 | 1557876 | 1559222 | complement | nadh oxidase (EC 1.6.99.3) | swiss\|P37061\|NAOX_ENTFA | 5.00E−120 |
| | | | | | (noxase) (nox) | | |
| NO. 802 | BL1267 | 1559471 | 1560796 | + | udp-n-acetylglucosamine | trembl\|AL138851\|SCE59_8 | 5.00E−168 |
| NO. 803 | BL1268 | 1560845 | 1562098 | complement | probable aminotransferase | trembl\|AL021428\|MTV030_17 | 4.00E−62 |
| NO. 804 | BL1269 | 1562192 | 1563124 | complement | probable lysr-type transcriptional | trembl\|AL031317\|SC6G4_44 | 5.00E−31 |
| | | | | | regulator | | |
| NO. 805 | BL1270 | 1563211 | 1564476 | complement | hypothetical transmembrane | trembl\|AE001715\|AE001715_5 | 5.00E−35 |
| | | | | | protein possibly | | |
| NO. 806 | BL1272 | 1565364 | 1567226 | + | arginyl-trna synthetase (EC | swiss\|Q10609\|SYR_MYCTU | 5.00E−149 |
| | | | | | 6.1.1.19) | | |
| NO. 807 | BL1273 | 1567229 | 1568821 | + | probable diaminopirmelate | swiss\|P31848\|DCDA_MYCTU | 5.00E−74 |
| | | | | | decarboxylase (EC | | |
| NO. 808 | BL1274 | 1568982 | 1570298 | + | homoserine dehydrogenase (EC | swiss\|Q10601\|DHOM_MYCTU | 5.00E−103 |
| | | | | | 1.1.1.3) (hdh) | | |
| NO. 809 | BL1275 | 1570405 | 1571517 | + | possible homoserine kinase (EC | swissnew\|P45836\|KHSE_MYCU | 4.00E−33 |
| | | | | | 2.7.1.39) (hk) | | |
| NO. 810 | BL1276 | 1571654 | 1573102 | + | hypothetical protein with mutt | tremblnew\|AL512667\|SC2K31_18 | 1.00E−31 |
| | | | | | domain | | |
| NO. 811 | BL1277 | 1573298 | 1574371 | + | atp-binding protein of abc | tremblnew\|AL391754\|SCK7_8 | 9.00E−60 |
| | | | | | transporter system | | |
| NO. 812 | BL1280 | 1576974 | 1578248 | + | succinyl-diaminoprimelate | trembl\|Z93777\|MTC1364_12 | 2.00E−75 |
| | | | | | desuccinylase (EC | | |
| NO. 813 | BL1281 | 1578585 | 1581596 | + | ribonuclese g (EC 3.1.4.—) (mase | trembl\|AL139298\|SCC88_10 | 5.00E−160 |
| | | | | | g) (me) | | |
| NO. 814 | BL1282 | 1581748 | 1582056 | + | 50s ribosomal protein 121. (rpIU) | swiss\|P71907\|RL21_MYCTU | 3.00E−25 |
| NO. 815 | BL1283 | 1582079 | 1582327 | + | 50s ribosomal protein 127. (rpmA) | pironly\|H82559\|H82559 | 2.00E−27 |
| NO. 816 | BL1284 | 1582396 | 1584087 | + | gtp-binding protein (obg) | trembl\|D87916\|SGD916_3 | 5.00E−142 |
| NO. 817 | BL1285 | 1584088 | 1585221 | + | glutamate 5-kinase (EC 2.7.2.11) | trembl\|AL136518\|SCC123_25 | 5.00E−104 |
| | | | | | (gamma-glutamyl | | |
| NO. 818 | BL1286 | 1585312 | 1586517 | + | aspartate aminotransferase ec | gp\|AL160431\|7248339 | 5.00E−139 |
| | | | | | 2.6.1.1 (aspC) | | |
| NO. 819 | BL1288 | 1587018 | 1587911 | + | probable transcription | gp\|AL160431\|7248341 | 3.00E−49 |
| | | | | | antitermination protein | | |
| NO. 820 | BL1290 | 1588174 | 1588605 | + | 50s ribosomal protein l11 (rpIK) | trembl\|AF130462\|AF130462_4 | 9.00E−54 |
| NO. 821 | BL1291 | 1588621 | 1589313 | + | 50s ribosomal protein l1 (rlpA) | gp\|AL160431\|7248343 | 6.00E−84 |
| NO. 822 | BL1292 | 1595385 | 1596212 | complement | morphine 6-dehydrogenase (EC | trembl\|AF008220\|AF008220_185 | 3.00E−78 |
| | | | | | 1.1.1.218) | | |
| NO. 823 | BL1293 | 1596344 | 1597795 | + | xylulose kinase (EC 2.7.1.17) | swiss\|P21939\|XYLB_LACPE | 1.00E−54 |
| | | | | | (xylulokinase) | | |
| NO. 824 | BL1295 | 1598185 | 1599600 | + | histidinol dehydrogenase (EC | swissnew\|P28736\|HISX_MYCSM | 5.00E−130 |
| | | | | | 1.1.1.23) (hdh) | | |
| NO. 825 | BL1296 | 1599597 | 1600757 | + | histidinol-phosphate | swissnew\|P16246\|HIS8_STRCO | 5.00E−93 |
| | | | | | aminotransferase (EC | | |
| NO. 826 | BL1297 | 1600843 | 1603442 | + | imidazoleglycerol-phosphate | swiss\|O06590\|HIS7_MYCTU | 4.00E−65 |
| | | | | | dehydratase (EC | | |
| NO. 827 | BL1299 | 1602271 | 1602918 | + | aminotransferase hish | swissnew\|P16249\|HIS5_STRCO | 1.00E−60 |
| | | | | | (EC 2.4.2.—) (hisH) | | |
| NO. 828 | BL1300 | 1602988 | 1603713 | + | phosphoribosylformimino-5- | swissnew\|P16250\|HIS4_STRCO | 8.00E−84 |
| | | | | | aminoimidazole | | |
| NO. 829 | BL1301 | 1603817 | 1605250 | complement | narrowly conserved hypothetical | trembl\|AL031232\|SC10H5_7 | 5.00E−100 |
| | | | | | protein with | | |
| NO. 830 | BL1302 | 1605399 | 1606736 | + | glutamine synthelase (glutamate- | trembl\|AL136500\|SC1G2_3 | 0 |
| | | | | | ammonia ligase) | | |
| NO. 831 | BL1305 | 1608481 | 1612689 | complement | atp-dependent helicase (hrpA) | trembl\|AL118514\|SCD25_28 | 0 |
| NO. 832 | BL1306 | 1612607 | 1613263 | complement | conserved hypothetical protein | swissnew\|P37872\|YBXB_BACSU | 4.00E−31 |
| | | | | | possibly in | | |
| NO. 833 | BL1307 | 1613422 | 1614927 | + | gtp-binding protein (hflX) | trembl\|AL022268\|SC4H2_17 | 5.00E−134 |
| NO. 834 | BL1308 | 1615087 | 1616070 | + | lactate dehydrogenase (EC | swiss\|P19869\|LDH_BIFLO | 0 |
| | | | | | 1.1.1.27) (ldh) | | |
| NO. 835 | BL1309 | 1616212 | 1617150 | complement | probable cation efflux protein | trembl\|AL049587\|SC5F2A_34 | 2.00E−57 |
| NO. 836 | BL1310 | 1617316 | 1618041 | complement | lexa repressor (EC 3.4.21.88) (sos | trembl\|AJ224870\|SCAJ487O_2 | 3.00E−62 |
| | | | | | regulatory | | |
| NO. 837 | BL1312 | 1618559 | 1619035 | + | hypothetical protein with high | trembl\|AJ224870\|SCAJ4870_3 | 3.00E−52 |
| | | | | | similarity to | | |
| NO. 838 | BL1313 | 1619170 | 1620369 | complement | d-3-phosphoglycerate | pironly\|C82072\|C82072 | 5.00E−111 |
| | | | | | dehydrogenase (EC 1.1.1.95) | | |
| NO. 839 | BL1314 | 1620380 | 1622659 | complement | narrowly conserved hypothetical | trembl\|AL138978\|SC6A11_15 | 5.00E−126 |
| | | | | | protein with | | |
| NO. 840 | BL1315 | 1622992 | 1623513 | + | conserved hypothetical protein in | tremblnew\|AP001516\|AP001516_5 | 2.00E−30 |
| | | | | | upf0040 | | |
| NO. 841 | BL1316 | 1623513 | 1624592 | + | widely conserved hypothetical | trembl\|AL109663\|SC4A10_25 | 3.00E−79 |
| | | | | | protein in | | |
| NO. 842 | BL1317 | 1625045 | 1626847 | + | peptidoglycan synthetase. | trembl\|AL109663\|SC4A10_23 | 3.00E−84 |
| | | | | | penicillin-binding | | |
| NO. 843 | BL1319 | 1627795 | 1629246 | + | udp-n-acetylmuramoylalanyl-d- | trnembl\|AL109663\|SC4A10_21 | 2.00E−82 |
| | | | | | glutamyl-2,6-diaminopimelate-d- | | |
| | | | | | alanyl-d- | | |
| NO. 844 | BL1320 | 1629291 | 1630397 | + | phospho-n-acetylmuramoyl- | swiss\|P56833\|MRAY_STRCO | 3.00E−87 |
| | | | | | pentapeptide-transferase | | |
| NO. 845 | BL1321 | 1630452 | 1631897 | + | udp-n-acetylmuramoylalanine-d- | trembl\|AL109663\|SC4A10_19 | 5.00E−88 |
| | | | | | glutamate ligase | | |
| NO. 846 | BL1322 | 1631884 | 1633101 | + | probable ftsw-like protein (fstW) | trembl\|U10879\|SC10879_2 | 7.00E−47 |
| NO. 847 | BL1323 | 1633117 | 1634298 | + | udp-n-acetylglucosamine-n- | swissnew\|Q9ZBA5\|MURG_STRCO | 2.00E−87 |
| | | | | | acetylmuramyl-(pentapeptide) | | |
| NO. 848 | BL1324 | 1634399 | 1635937 | + | udp-n-acetylmuramate-alanine | swiss\|Q9X827\|MURC_STRCO | 5.00E−80 |
| | | | | | ligase (EC | | |
| NO. 849 | BL1325 | 1638253 | 1638537 | complement | narrowly conserved hypothetical | pironly\|F82517\|F82517 | 1.00E−20 |
| | | | | | protein with | | |
| NO. 850 | BL1326 | 1639341 | 1639817 | + | conserved hypothetical protein | trembl\|X72832\|SEDEXB_5. | 6.00E−34 |
| | | | | | with unknown | | |
| NO. 851 | BL1327 | 1639978 | 1643097 | + | alpha-mannosidase (EC 3.2.1.24) | trembl\|AL133278\|SCM11_3 | 0 |
| NO. 852 | BL1328 | 1643228 | 1646368 | + | alpha-mannosidase (EC 3.2.1.24) | trembl\|AL133278\|SCM11_3 | 0 |
| NO. 853 | BL1329 | 1646638 | 1649742 | + | alpha-mannosidase (EC 3.2.1.24) | trembl\|AL133278\|SCM11_3 | 0 |
| NO. 854 | BL1330 | 1649938 | 1651209 | + | probable solute-binding protein of | trembl\|AL133278\|SCM11_7 | 3.00E−91 |
| | | | | | abc | | |
| NO. 855 | BL1331 | 1651212 | 1652150 | + | probable sugar permease of abc | trembl\|AL133278\|SCM11_6 | 9.00E−74 |
| | | | | | transporter | | |
| NO. 856 | BL1332 | 1652150 | 1653007 | + | probable sugar permease of abc | trembl\|AL133278\|SCM11_5 | 1.00E−73 |
| | | | | | transporter | | |
| NO. 857 | BL1333 | 1653021 | 1654310 | + | narrowly conserved hypothetical | trembl\|AL133278\|SCM11_4 | 5.00E−101 |
| | | | | | protein with | | |
| NO. 858 | BL1334 | 1654435 | 1657077 | + | probable pentosidase or | tremblnew\|AL512980\| | 9.00E−45 |
| | | | | | hexosidase | SSOLP2N19_{—30} | |
| NO. 859 | BL1335 | 1657125 | 1659938 | + | probable endo-beta-n- | tremblnew\|AP001509\| | 5.00E−177 |
| | | | | | acetylglucosaminidase; | AP001509_223 | |
| NO. 860 | BL1336 | 1660234 | 1661340 | + | probable laci-type transcriptional | trembl\|AL133278\|SCM11_8 | 2.00E−59 |
| | | | | | regulator | | |
| NO. 861 | BL1337 | 1661462 | 1662760 | complement | narrowly conserved hypothetical | swiss\|P32140\|YIHS_ECOLI | 7.00E−83 |
| | | | | | protein with | | |
| NO. 862 | BL1338 | 1662764 | 1664062 | complement | narrowly conserved hypothetical | tremblnew\|AP001509\| | 5.00E−108 |
| | | | | | protein with | AP001509_228 | |
| NO. 863 | BL1340 | 1665242 | 1666456 | complement | probable transcriptional repressor | trembl\|AL009199\|SC7B7_5 | 7.00E−42 |
| | | | | | in the rok | | |
| NO. 864 | BL1341 | 1666683 | 1667597 | + | possible sugar kinase | swiss\|P54495\|GLK_BACSU | 2.00E−32 |
| NO. 865 | BL1342 | 1667747 | 1668871 | complement | nagc/xlyr-type transciptional | tremblnew\|AP001516\| | 2.00E−33 |
| | | | | | regulator | AP001516_187 | |
| NO. 866 | BL1343 | 1669209 | 1670021 | + | glucosamine-6-phosphate | swiss\|O31458\|YBFT_BACSU | 7.00E−49 |
| | | | | | isomerase 1 (EC | | |
| NO. 867 | BL1344 | 1670077 | 1671360 | + | n-acetylglucosamine-6-phosphate | trembl\|AL021841\|MTV016_30 | 8.00E−55 |
| | | | | | deacetylase (EC | | |
| NO. 868 | BL1345 | 1671640 | 1673274 | + | probable solute-binding protein of | trembl\|AL132648\|SCI41_38 | 2.00E−89 |
| | | | | | abc | | |
| NO. 869 | BL1346 | 1673439 | 1674530 | + | probable permease of abc | trembl\|AE001772\|AE001772_4 | 2.00E−76 |
| | | | | | transporter for | | |
| NO. 870 | BL1347 | 1674649 | 1675701 | + | probable permease of abc | trembl\|AE000980\|AE000980_2 | 1.00E−58 |
| | | | | | transporter for | | |
| NO. 871 | BL1348 | 1675705 | 1677414 | + | atp binding protein of abc | trembl\|D90720\|ECD720_13 | 5.00E−124 |
| | | | | | transporter | | |
| NO. 872 | BL1349 | 1677464 | 1677985 | complement | hypothetical protein containing | tremblnew\|AL445963\|SC2G2_26 | 3.00E−32 |
| | | | | | mutt-like | | |
| NO. 873 | BL1350 | 1678034 | 1679629 | complement | xaa-pro aminopeptidase i (EC | swiss\|Q05813\|AMP1_STRLI | 5.00E−110 |
| | | | | | 3.4.11.9) (x-pro | | |
| NO. 874 | BL1353 | 1682038 | 1683627 | + | folylpolyglutamate synthase ec | trembl\|AL139298\|SCC88_25 | 5.00E−104 |
| | | | | | 6.3.2.17 (folC or | | |
| NO. 875 | BL1354 | 1683688 | 1687365 | + | chromosome partitioning protein | trembl\|AL034447\|SC7A1_21 | 0 |
| | | | | | smc (smc) | | |
| NO. 876 | BL1356 | 1688601 | 1690154 | complement | udp-n-acetylmuramoylalanyl-d- | swiss\|O69557\|MURE_MYCLE | 6.00E−39 |
| | | | | | glutamate-2,6-diaminopimelate | | |
| NO. 877 | BL1357 | 1690272 | 1691081 | + | rna polymerase sigma-e factor | trembl\|AF144091\|AF144091_4 | 6.00E−37 |
| | | | | | (sigma-24) (sigH) | | |
| NO. 878 | BL1359 | 1691667 | 1692611 | complement | hypothetical protein with possible | tremblnew\|AE005619\|AE005619_2 | 8.00E−30 |
| NO. 879 | BL1360 | 1692736 | 1693692 | complement | hypothetical protein in aldose | tremblnew\|AE005619\|AE005619_2 | 4.00E−24 |
| | | | | | epimerase family | | |
| NO. 880 | BL1361 | 1693917 | 1694975 | + | lytb protein involved with rela and | swissnew\|O53458\|LYB1_MYCTU | 9.00E−89 |
| | | | | | the | | |
| NO. 881 | BL1362 | 1695015 | 1695452 | complement | conserved hypothetical protein | trembl\|AL096884\|SC4G6_27 | 1.00E−33 |
| | | | | | very similar to | | |
| NO. 882 | BL1363 | 1695618 | 1696676 | complement | glyceraldehyde 3-phosphate | trembl\|AJ000339\|LDGAPPGK_2 | 5.00E−120 |
| | | | | | dehydrogenase c (EC | | |
| NO. 883 | BL1366 | 1699250 | 1699885 | + | translation initiation factor if-3 | swiss\|O88060\|IF3_STRCO | 2.00E−48 |
| | | | | | (infC) | | |
| NO. 884 | BL1367 | 1700113 | 1700496 | + | 50s ribosomal protein l20. (rpIT) | swiss\|O88058\|RL20_STRCO | 4.00E−50 |
| NO. 885 | BL1368 | 1700611 | 1701537 | + | probable integrase/recombinase | trembl\|Z98268\|MTCI125_22 | 5.00E−70 |
| NO. 886 | BL1369 | 1701665 | 1704511 | + | large protein with n-terminal | trembl\|U73183\|U73183_1 | 5.00E−111 |
| | | | | | similarity to atp | | |
| NO. 887 | BL1370 | 1704713 | 1705612 | + | widely conserved hypothetical | trembl\|AL109848\|SCI51_12 | 2.00E−86 |
| | | | | | protein in para | | |
| NO. 888 | BL1371 | 1705631 | 1706545 | + | narrowly conserved hypothetical | trembl\|Z98268\|MTCI125_30 | 5.00E−42 |
| | | | | | protein with | | |
| NO. 889 | BL1372 | 1706558 | 1707274 | + | conserved hypothetical protein | trembl\|AL109848\|SCI51_9 | 6.00E−46 |
| | | | | | with unknown | | |
| NO. 890 | BL1373 | 1707406 | 1708233 | + | narrowly conserved hypothetical | trembl\|D90913\|SSD913_123 | 1.00E−30 |
| | | | | | protein possibly | | |
| NO. 891 | BL1374 | 1708294 | 1709574 | + | quinolinate synthetase (nadA) | tremblnew\|AP001511\| | 5.00E−104 |
| | | | | | | AP001511_109 | |
| NO. 892 | BL1375 | 1709662 | 1711293 | + | 1-aspartate oxidase (EC 1.4.3.16) | trembl\|AL049628\|SCE94_33 | 2.00E−94 |
| | | | | | (quinolinate | | |
| NO. 893 | BL1376 | 1711297 | 1712190 | + | probable nicotinate-nucleotide | tremblnew\|AX064321\|AX064321_1 | 7.00E−77 |
| | | | | | pyrophosphorylase | | |
| NO. 894 | BL1377 | 1712193 | 1713440 | + | possible pyridoxal-phosphate- | trembl\|AL031184\|SC2A11_20 | 5.00E−72 |
| | | | | | dependent | | |
| NO. 895 | BL1378 | 1713472 | 1714821 | + | probable sugar transporter | tremblnew\|AX066931\|AX066931_1 | 5.00E−127 |
| NO. 896 | BL1379 | 1715136 | 1717067 | + | widely conserved protein similar | trembl\|Z95584\|MTCI65_32 | 0 |
| | | | | | to those | | |
| NO. 897 | BL1381 | 1717693 | 1718670 | + | probable chorismate mutase (EC | embl\|AE000889\|AE000889 | 6.00E−22 |
| | | | | | 5.4.99.5) (cm); | | |
| NO. 898 | BL1382 | 1718664 | 1719731 | + | probable prephenate | trembl\|AE001962\|AE001962_4 | 1.00E−30 |
| | | | | | dehydrogenase ec1.3.1.12 | | |
| NO. 899 | BL1384 | 1720235 | 1721308 | + | probable integrase/recombinase | trembl\|Z97369\|MLCB250_29 | 3.00E−59 |
| | | | | | protein similar | | |
| NO. 900 | BL1386 | 1721561 | 1723201 | + | solute binding protein of abc | trembl\|AL022121\|MTV025_15 | 5.00E−114 |
| | | | | | transporter system | | |
| NO. 901 | BL1387 | 1723502 | 1724428 | + | probable permease protein of abc- | trembl\|AL022121\|MTV025_14 | 5.00E−71 |
| | | | | | transporter for | | |
| NO. 902 | BL1389 | 1724447 | 1725451 | + | probable permease protein of abc- | trembl\|AL022121 \|MTV025_13 | 1.00E−77 |
| | | | | | transporter for | | |
| NO. 903 | BL1390 | 1725474 | 1727483 | + | probable atp binding protein of | trembl\|AL022121\|MTV025_12 | 5.00E−135 |
| | | | | | abc transporter | | |
| NO. 904 | BL1391 | 1727588 | 1728448 | + | possible exodeoxyribonuclease | trembl\|AL132674\|SCE87_25 | 2.00E−58 |
| | | | | | (EC 3.1.11.2) | | |
| NO. 905 | BL1392 | 1728516 | 1729370 | + | narrowly conserved hypothetical | trembl\|AL021530\|SC2E9_10 | 1.00E−24 |
| | | | | | protein with | | |
| NO. 906 | BL1394 | 1730095 | 1731402 | + | conserved hypothetical protein | trembl\|AL021529\|SC10A5_6 | 1.00E−50 |
| | | | | | with duf90 | | |
| NO. 907 | BL1396 | 1732200 | 1734713 | + | probable cation-transporting | trembl\|AL035654\|SCE8_9 | 5.00E−159 |
| | | | | | atpase (EC 3.6.1) | | |
| NO. 908 | BL1397 | 1734834 | 1737533 | + | aconitate hydratase (EC 4.2.1.3) | trembl\|AL021184\|MTV007_22 | 0 |
| | | | | | (citrate | | |
| NO. 909 | BL1402 | 1741470 | 1742195 | complement | response regulator of two- | trembl\|AL132824\|SCAH10_19 | 5.00E−35 |
| | | | | | component system | | |
| NO. 910 | BL1403 | 1742230 | 1743498 | complement | atypical histidine kinase sensor of | trembl\|AL132824\|SCAH10_18 | 5.00E−20 |
| NO. 911 | BL1405 | 1744823 | 1745722 | + | conserved hypothetical protein | tremblnew\|AE005259\|AE005259_8 | 1.00E−31 |
| | | | | | with mutt type | | |
| NO. 912 | BL1406 | 1745862 | 1746878 | + | possible integral membrane | pironly\|B83194\|B83194 | 6.00E−42 |
| | | | | | protein with duf6 | | |
| NO. 913 | BL1407 | 1746911 | 1747753 | complement | narrowly conserved hypothetical | tremblnew\|AP001513\| | 2.00E−43 |
| | | | | | protein with | AP001513_158 | |
| NO. 914 | BL1408 | 1747795 | 1749237 | + | widely conserved hypothetical | trembl\|AL022268\|SC4H2_8 | 5.00E−152 |
| | | | | | protein in | | |
| NO. 915 | BL1409 | 1749248 | 1750234 | + | trna delta(2)- | swissnew\|O69967\|MIAA_STRCO | 4.00E−78 |
| | | | | | isopentenylpyrophosphate | | |
| NO. 916 | BL1411 | 1751229 | 1754138 | + | cell division protein ftsk (ftsK) | trembl\|AL031031\|SC7C7_5 | 0 |
| NO. 917 | BL1412 | 1754291 | 1754950 | + | cdp-diacylglycerol-glycerol-3- | trembl\|U00019\|ML019_22 | 1.00E−27 |
| | | | | | phosphate | | |
| NO. 918 | BL1415 | 1756716 | 1757909 | + | reca protein (recombinase a) | swissnew\|Q9S660\|RECA_BIFBR | 0 |
| | | | | | (recA) | | |
| NO. 919 | BL1416 | 1757912 | 1758505 | + | recx-like protein | embl\|AF094756\|AF094756 | 1.00E−81 |
| NO. 920 | BL1417 | 1758685 | 1759251 | + | hypothetical protein with unknown | embl\|AF094756\|AF094756 | 4.00E−36 |
| | | | | | function | | |
| NO. 921 | BL1418 | 1759382 | 1760044 | + | hypothetical protein in sigma 54 | trembl\|Z95121\|MTY20BI1_16 | 4.00E−33 |
| | | | | | modulation | | |
| NO. 922 | BL1419 | 1760206 | 1763100 | + | preprotein translocase seca | swissnew\|P55021\|SECA_STRCO | 0 |
| | | | | | subunit (secA) | | |
| NO. 923 | BL1422 | 1764354 | 1765400 | + | anthranilate | swiss\|O68608\|TRD1_STRCO | 4.00E−75 |
| | | | | | phosphoribosyltransferase 1 (EC | | |
| NO. 924 | BL1424 | 1766545 | 1767249 | + | widely conserved hypothetical | trembl\|AL157956\|SCL24_2 | 5.00E−58 |
| | | | | | protein with acyl | | |
| NO. 925 | BL1425 | 1767301 | 1769574 | complement | probable serine-threonine protein | trembl\|AL109661\|SC6E10_4 | 4.00E−59 |
| | | | | | kinase | | |
| NO. 926 | BL1426 | 1769718 | 1770836 | complement | probably bifunctional short chain | trembl\|AL021957\|MTV021_7 | 9.00E−30 |
| | | | | | isoprenyl | | |
| NO. 927 | BL1428 | 1771872 | 1773296 | + | ma polymerase principal sigma | trembl\|M90411\|SAHRDB_1 | 5.00E−143 |
| | | | | | factor, sigma 70 | | |
| NO. 928 | BL1429 | 1773354 | 1775672 | + | dna gyrase subunit b, (EC | trembl\|AL022374\|SC5B8_12 | 0 |
| | | | | | 5.99.1.3) (gyrB) | | |
| NO. 929 | BL1431 | 1777139 | 1778101 | + | probable ribokinase (EC 2.7.1.15) | pironly\|B83403\|B83403 | 5.00E−50 |
| NO. 930 | BL1432 | 1778117 | 1782850 | + | atp-dependent helicase ii (1 hr) | trembl\|AL031031\|SC7C7_16 | 0 |
| NO. 931 | BL1434 | 1783794 | 1786523 | complement | dna gyrase subunit a (EC | trembl\|AL009204\|SC9B10_3 | 0 |
| | | | | | 5.99.1.3) (gyrA) | | |
| NO. 932 | BL1435 | 1786753 | 1788042 | + | narrowly conserved hypothetical | trembl\|AL009204\|SC9B10_11 | 3.00E−48 |
| | | | | | protein with | | |
| NO. 933 | BL1438 | 1789595 | 1790071 | + | deoxyuridine 5′-triphosphate | swiss\|O54134\|DUT_STRCO | 4.00E−42 |
| | | | | | nucleotidohydrolase | | |
| NO. 934 | BL1439 | 1790184 | 1792529 | + | gtp pyrophosphokinase (EC | swissnew\|P52560\|RELA_STRCO | 0 |
| | | | | | 2.7.6.5) (atp:gtp | | |
| NO. 935 | BL1440 | 1792647 | 1793531 | complement | is3-type transposase | tremblnew\|AE000433\|ECAE433_4 | 9.00E−48 |
| NO. 936 | BL1442 | 1794113 | 1794661 | complement | possible peptidyl-prolyl cis-trans | tyembl\|U64692\|SCU64692_1 | 6.00E−48 |
| | | | | | isomerase | | |
| NO. 937 | BL1444 | 1796077 | 1797012 | complement | widely conserved hypothetical | trembl\|AP000002\|AP000002_291 | 3.00E−23 |
| | | | | | transmembrane | | |
| NO. 938 | BL1447 | 1799086 | 1799931 | + | possible phosphoglycerate mutase | trembl\|Z81368\|MTCY253_35 | 2.00E−22 |
| NO. 939 | BL1448 | 1800046 | 1800996 | + | possible magnesium and cobalt | trembl\|AE002075\|AE002075_11 | 1.00E−61 |
| | | | | | transport protein | | |
| NO. 940 | BL1449 | 1801011 | 1801937 | + | solute binding protein of abc | trembl\|AL020958\|SC4H8_15 | 1.00E−32 |
| | | | | | transporter | | |
| NO. 941 | BL1450 | 1801980 | 1804943 | + | leucyl-trna synthetase (EC | trembl\|AL136518\|SCC123_9 | 0 |
| | | | | | 6.1.1.4) | | |
| NO. 942 | BL1452 | 1805946 | 1807634 | + | conserved hypothetical | trembl\|AL136518\|SCC123_5 | 3.00E−26 |
| | | | | | transmembrane protein | | |
| NO. 943 | BL1453 | 1807774 | 1809120 | + | possible prolidase ec 3.4.13.9 (x- | tremblnew\|AP001517\|AP001517_57 | 2.00E−37 |
| | | | | | pro | | |
| NO. 944 | BL1454 | 1809283 | 1810158 | + | hypothetical protein with possible | trembl\|AL136518\|SCC123_2 | 2.00E−35 |
| | | | | | dna binding | | |
| NO. 945 | BL1457 | 1812256 | 1813299 | + | metalloendopeptidase gcp (gcp) | swiss\|O86793\|GCP_STRCO | 9.00E−98 |
| NO. 946 | BL1458 | 1813966 | 1814901 | + | probable integrase/recombinse | trembl\|Z80225\|MTCY441_16 | 3.00E−25 |
| NO. 947 | BL1467 | 1822821 | 1824281 | complement | possible trag-related protein | tremblnew\|AL391754\|SCK7_2 | 3.00E−22 |
| NO. 948 | BL1469 | 1825372 | 1828008 | + | dna topoisomerase iii (topb) (EC | trembl\|AB001488\|BSAB1488_10 | 9.00E−87 |
| | | | | | 5.99.1.2) | | |
| NO. 949 | BL1472 | 1829232 | 1830500 | complement | type ii restriction enzyme very | trembl\|AJ224995\|ECO224995_1 | 8.00E−37 |
| | | | | | similar to | | |
| NO. 950 | BL1473 | 1830546 | 1831517 | complement | modification methylase very | swissnew\|P24581\|MTNX_NEILA | 3.00E−84 |
| | | | | | similar to ecorii | | |
| NO. 951 | BL1476 | 1833873 | 1835348 | complement | conserved hypothetical protein | swiss\|P55564\|Y4ME_RHISN | 6.00E−36 |
| | | | | | with unknown | | |
| NO. 952 | BL1479 | 1837643 | 1839451 | complement | narrowly conserved hypothetical | trembl\|AL049645\|SCE2_7 | 2.00E−59 |
| | | | | | protein similar | | |
| NO. 953 | BL1483 | 1842269 | 1843783 | complement | narrowly conserved hypothetical | tremblnew\|AP001204\|AP001204_38 | 3.00E−56 |
| | | | | | protein with | | |
| NO. 954 | BL1484 | 1843882 | 1845369 | complement | narrowly conserved hypothetical | tremblnew\|AP001204\|AP001204_39 | 9.00E−50 |
| | | | | | protein with | | |
| NO. 955 | BL1489 | 1858431 | 1863242 | complement | hypothetical protein with limited | trembl\|M64978\|PPPRGAB_4 | 5.00E−28 |
| | | | | | similarity to | | |
| NO. 956 | BL1492 | 1866104 | 1866697 | complement | hypothetical protein with | tremblnew\|AF121000\|AF121000_7 | 8.00E−29 |
| | | | | | similarity to the par | | |
| NO. 957 | BL1497 | 1871350 | 1872039 | + | narrowly conserved hypothetical | swiss\|Q10812\|YS91_MYCTU | 3.00E−20 |
| | | | | | protein in | | |
| NO. 958 | BL1499 | 1873997 | 1875217 | complement | isocitrate dehydrogenase [nadp] | swiss\|O53389\|IDH_MYCTU | 5.00E−179 |
| | | | | | (EC 1.1.1.42) | | |
| NO. 959 | BL1500 | 1875345 | 1876469 | + | inosine-5′-monophosphate | gp\|AL161755\|7320890 | 5.00E−147 |
| | | | | | dehydrogenase (guaB) | | |
| NO. 960 | BL1501 | 1877213 | 1879300 | + | possible long-chain-fatty acid coa | trembl\|AL021957\|MTV021_21 | 5.00E−118 |
| | | | | | ligase | | |
| NO. 961 | BL1502 | 1879307 | 1879795 | + | polypeptide deformylase (EC | swiss\|Q9XAQ2\|DEF_STRCO | 2.00E−29 |
| | | | | | 3.5.1.31) (pdf) | | |
| NO. 962 | BL1503 | 1880107 | 1880997 | + | 30s ribosomal protein s2. (rpsB) | trembl\|AL023797\|SC2E1_41 | 1.00E−94 |
| NO. 963 | BL1504 | 1881076 | 1881927 | + | elongation factor ts (ef-ts) (tsf) | swiss\|O31213\|EFTS_STRCO | 1.00E−49 |
| NO. 964 | BL1505 | 1882101 | 1882841 | + | uridylate kinase (EC 2.7.4.—) (uk) | trembl\|AL023797\|SC2E1_43 | 6.00E−82 |
| | | | | | (uridine | | |
| NO. 965 | BL1506 | 1882918 | 1883469 | + | ribosome recycling factor | swiss\|O86770\|RRF_STRCO | 5.00E−55 |
| | | | | | (ribosome releasing | | |
| NO. 966 | BL1507 | 1883492 | 1884478 | + | probable phosphatidate | trembl\|AL031035\|SC6A9_39 | 3.00E−29 |
| | | | | | cytidylyltransferase (EC | | |
| NO. 967 | BL1508 | 1884689 | 1885858 | + | widely conserved hypothetical | trembl\|AL031035\|SC6A9_22 | 5.00E−115 |
| | | | | | protein with | | |
| NO. 968 | BL1509 | 1885859 | 1886407 | complement | hypothetical protein in the thij/pfpi | pironly\|D83125\|D83125 | 3.00E−37 |
| | | | | | family | | |
| NO. 969 | BL1510 | 1886616 | 1887800 | + | transpsosase in is 256 family | swiss\|Q52873\|TRA5_RHIME | 5.00E−61 |
| NO. 970 | BL1512 | 1889585 | 1890166 | complement | deoxycytidine triphosphate | swissnew\|Q9X8W0\|DCD_STRCO | 5.00E−72 |
| | | | | | deaminase (EC | | |
| NO. 971 | BL1515 | 1892320 | 1893174 | + | widely conserved hypothetical | tremblnew\|AP001518\| | 2.00E−20 |
| | | | | | transmembrane | AP001518_285 | |
| NO. 972 | BL1516 | 1893218 | 1895290 | complement | probable nhap-type na(+)/h(+) | trembl\|Z99121\|BSUB0018_28 | 2.00E−76 |
| | | | | | exchanger | | |
| NO. 973 | BL1517 | 1895390 | 1895866 | + | possible cytidine and | trembl\|AL022121\|MTV025_101 | 1.00E−37 |
| | | | | | deoxycytidylate deaminase | | |
| NO. 974 | BL1518 | 1895986 | 1898292 | + | alpha-galactosidase (EC 3.2.1.22) | trembl\|AF124596\|AF124596_1 | 0 |
| | | | | | (melibiase) | | |
| NO. 975 | BL1520 | 1898457 | 1899665 | complement | possible nagc/xylr-tpye | tremblnew\|AL449216\|SC35B7_12 | 8.00E−49 |
| | | | | | transcriptional | | |
| NO. 976 | BL1521 | 1899839 | 1901128 | + | sugar binding protein of abc | swiss\|Q00749\|MSME_STRMU | 5.00E−28 |
| | | | | | transporter system | | |
| NO. 977 | BL1522 | 1901150 | 1902079 | + | sugar permease of abc transporter | swiss\|Q00750\|MSMF_STRMU | 2.00E−50 |
| | | | | | system | | |
| NO. 978 | BL1523 | 1902098 | 1902964 | + | sugar permease of abc transporter | swiss\|Q00751\|MSMG_STRMU | 6.00E−48 |
| | | | | | system | | |
| NO. 979 | BL1526 | 1904380 | 1906200 | + | oligo-1,6-glucosidase (EC | swiss\|P29094\|O16G_BACTR | 5.00E−168 |
| | | | | | 3.2.1.10) | | |
| NO. 980 | BL1527 | 1906486 | 1907733 | + | catabolic threonine dehydratase | tremblnew\|AL451182\|SCK13_16 | 2.00E−87 |
| | | | | | (tdcB) | | |
| NO. 981 | BL1528 | 1907879 | 1908529 | complement | sir2-type regulatory protein | trembl\|AE001726\|AE001726_9 | 4.00E−31 |
| NO. 982 | BL1530 | 1915778 | 1916530 | + | probable iclr-type transcriptional | trembl\|AL078635\|CZA382_19 | 2.00E−20 |
| | | | | | regulator | | |
| NO. 983 | BL1531 | 1916637 | 1917503 | complement | narrowly conserved hypothetical | trembl\|AL133423\|SC4A7_14 | 7.00E−24 |
| | | | | | protein with | | |
| NO. 984 | BL1535 | 1921809 | 1923773 | + | acetyl-/propionyl-coenzyme a | trembl\|AF126429\|AF126429_1 | 5.00E−131 |
| | | | | | carboxylase alpha | | |
| NO. 985 | BL1536 | 1923766 | 1925388 | + | propionyl-coa carboxylase beta | tremblnew\|AL512667\|SC2K31_15 | 5.00E−153 |
| | | | | | chain (EC | | |
| NO. 986 | BL1537 | 1925427 | 1934945 | + | type i multifunctional fatty acid | trembl\|X87822\|MAFASGEN_1 | 0 |
| | | | | | synthase | | |
| NO. 987 | BL1542 | 1942976 | 1944082 | complement | transpsosase in is 30 family | trembl\|AF189147\|AF189147_1 | 4.00E−45 |
| NO. 988 | BL1543 | 1944703 | 1947231 | + | endo-1,4-beta-xylanase d (EC | trembl\|Z99113\|BSUB0010_109 | 5.00E−128 |
| | | | | | 3.2.1.8) | | |
| NO. 989 | BL1544 | 1947454 | 1950330 | + | possible extracellular exo- | trembl\|AF005383\|AF005383_5 | 3.00E−95 |
| | | | | | xylanase (EC 3.2.1.8) | | |
| NO. 990 | BL1546 | 1952294 | 1955035 | + | polyribonucleotide | pironly\|T10932\|T10932 | 0 |
| | | | | | nucleotidyltransferase (EC | | |
| NO. 991 | BL1547 | 1955462 | 1956856 | complement | widely conserved hypothetical | pironly\|B82096\|B82096 | 3.00E−90 |
| | | | | | protein with | | |
| NO. 992 | BL1549 | 1958210 | 1958731 | + | 50s ribosomal protein 110 (rpIJ) | swiss\|P36257\|RL10_STRGR | 6.00E−48 |
| NO. 993 | BL1550 | 1958840 | 1959220 | + | 50s ribosomal protein 17/112 | trembl\|D50624\|SVVBRA1_8 | 2.00E−20 |
| | | | | | (rpIL) | | |
| NO. 994 | BL1555 | 1966051 | 1966800 | complement | hypothetical protein in the | trembl\|AL132674\|SCE87_33 | 2.00E−23 |
| NO. 995 | BL1556 | 1966827 | 1967522 | + | possible acetytransferase | embl\|AL132674\|SCE87 | 9.00E−27 |
| NO. 996 | BL1558 | 1969200 | 1969493 | + | groes (groES) | trembl\|AF071828\|AF071828_1 | 1.00E−30 |
| NO. 997 | BL1559 | 1970167 | 1971690 | complement | possible cystathiomine gamma | trembl\|U93874\|BSU93874_2 | 8.00E−70 |
| | | | | | lyase (EC | | |
| NO. 998 | BL1561 | 1972567 | 1973667 | + | udp-n- | gp\|AL160431\|7248337 | 2.00E−55 |
| | | | | | acetylenolpyruvoylglucosamine | | |
| | | | | | reductase | | |
| NO. 999 | BL1562 | 1973819 | 1975345 | + | possible cationic amino acid | trembl\|Z95121\|MTY20B11_28 | 5.00E−125 |
| | | | | | transporter | | |
| NO. 1000 | BL1563 | 1975406 | 1975726 | + | ferredoxin (fdxC) | trembl\|AL391751\|SC9E12_20 | 2.00E−42 |
| NO. 1001 | BL1564 | 1975841 | 1977076 | + | probable aminotransferase (EC | trembl\|AL010186\|MTV005_13 | 2.00E−61 |
| | | | | | 2.6.1.—) | | |
| NO. 1002 | BL1565 | 1977103 | 1978449 | complement | dna-damage-inducible protein p. | tremblnew\|AL162756\|NMA5Z2491_{—} | 7.00E−47 |
| | | | | | | 212 | |
| NO. 1003 | BL1566 | 1978489 | 1979553 | + | conserved hypothetical | pironly\|A83476\|A83476 | 5.00E−24 |
| | | | | | transmembrane protein | | |
| NO. 1004 | BL1567 | 1980088 | 1981431 | + | narrowly conserved hypothetical | trembl\|AL133469\|SCM10_29 | 6.00E−42 |
| | | | | | protein with | | |
| NO. 1005 | BL1568 | 1981505 | 1982521 | + | possible 2-hydroxyacid | trembl\|AL133236\|SCE65_14 | 1.00E−34 |
| | | | | | dehydrogenase | | |
| NO. 1006 | BL1569 | 1982700 | 1983224 | + | conserved hypothetical protein in | tremblnew\|AE005615\|AE005615_10 | 5.00E−23 |
| | | | | | upf 0029 | | |
| NO. 1007 | BL1570 | 1984143 | 1986308 | + | 4-alpha-glucanotransferase (EC | swiss\|O53932\|MALQ_MYCTU | 5.00E−150 |
| | | | | | 2.4.1.25) | | |
| NO. 1008 | BL1571 | 1986706 | 1987155 | + | 50s ribosomal protein l13 | swiss\|Q53874\|RL13_STRCO | 2.00E−47 |
| NO. 1009 | BL1572 | 1987178 | 1987669 | + | 30s ribosomal protein s9 (rpsl) | swiss\|Q53875\|RS9_STRCO | 5.00E−46 |
| NO. 1010 | BL1573 | 1987760 | 1990300 | complement | family 13 glycosyl hydrolase | trembl\|AL157916\|SC3D11_13 | 5.00E−133 |
| NO. 1011 | BL1574 | 1990297 | 1991490 | complement | probable repressor in the rok | tremblnew\|AP001509\| | 3.00E−20 |
| | | | | | (nagc/xylr) | AP001509_138 | |
| NO. 1012 | BL1575 | 1992005 | 1994734 | + | aldehyde-alcohol dehydrogenase 2 | swissnew\|Q24803\|ADH2_ENTHI | 0 |
| | | | | | [includes: | | |
| NO. 1013 | BL1577 | 1996328 | 1996636 | + | 30s ribosomal protein s10 (rpsJ) | gp\|AL161803\|7321291 | 1.00E−37 |
| NO. 1014 | BL1578 | 1996653 | 1997294 | + | 50s ribosomal protein l3 (rplC) | gp\|AL161803\|7321292 | 2.00E−72 |
| NO. 1015 | BL1579 | 1997301 | 1997957 | + | 50s ribosomal protein l4. (rplD) | gp\|AL161803\|7321293 | 3.00E−58 |
| NO. 1016 | BL1580 | 1997963 | 1998259 | + | 50s ribosomal protein l23. (rplW) | gp\|AL161803\|7321294 | 2.00E−30 |
| NO. 1017 | BL1581 | 1998296 | 1999126 | + | 50s ribosomal protein l2. (rplB) | swiss\|P95052\|RL2_MYCTU | 5.00E−116 |
| NO. 1018 | BL1582 | 1999142 | 1999420 | + | 30s ribosomal protein s19 (rpsS) | swiss\|O32985\|RS19_MYCLE | 2.00E−42 |
| NO. 1019 | BL1583 | 1999437 | 1999796 | + | 50s ribosomal protein l22 (rplV) | gp\|AL161803\|7321297 | 1.00E−34 |
| NO. 1020 | BL1584 | 1999799 | 2000602 | + | 30s ribosomal protein s3 (rpsC) | gp\|AL161803\|7321298 | 2.00E−91 |
| NO. 1021 | BL1586 | 2000609 | 2001028 | + | 50s ribosomal protein l16. (rplP) | gp\|AL161803\|7321299 | 8.00E−54 |
| NO. 1022 | BL1589 | 2001282 | 2001542 | + | 30s ribosomal protein s17. (rpsQ) | swiss\|O32990\|RS17_MYCLE | 4.00E−27 |
| NO. 1023 | BL1590 | 2001637 | 2002005 | + | 50s ribosomal protein l14. (rplN) | gp\|AL161803\|7321302 | 2.00E−52 |
| NO. 1024 | BL1591 | 2002007 | 2002342 | + | 50s ribosomal protein l24 (rplX) | swiss\|P33103\|RL24_MICLU | 2.00E−25 |
| NO. 1025 | BL1592 | 2002339 | 2002911 | + | 50s ribosomal protein 15 (rplE) | gp\|AL161803\|7321304 | 4.00E−71 |
| NO. 1026 | BL1593 | 2002913 | 2003098 | + | 30s ribosomal protein s14-1. | gp\|AL161803\|7321305 | 4.00E−25 |
| | | | | | (rpsN) | | |
| NO. 1027 | BL1594 | 2003188 | 2003586 | + | 30s ribosomal protein s8 (rpsH) | swiss\|P95066\|RS8_MYCTU | 3.00E−46 |
| NO. 1028 | BL1595 | 2003604 | 2004143 | + | 50s ribosomal protein l6 (rplF) | gp\|AL161803\|7321307 | 6.00E−49 |
| NO. 1029 | BL1596 | 2004145 | 2004516 | + | 50s ribosomal protein l18 (rplR) | gp\|AL161803\|7321308 | 9.00E−38 |
| NO. 1030 | BL1597 | 2004543 | 2005244 | + | ribosomal protein s5 (rpsE) | gp\|AL161803\|7321309 | 3.00E−56 |
| NO. 1031 | BL1599 | 2005438 | 2005890 | + | 50s ribosomal protein l15 (rplO) | swiss\|P33101\|RL15_MICLU | 2.00E−48 |
| NO. 1032 | BL1600 | 2006164 | 2007501 | + | preprotein translocase secy | swiss\|P43416\|SECY_STRSC | 5.00E−143 |
| | | | | | subunit. (secY) | | |
| NO. 1033 | BL1601 | 2007671 | 2008231 | + | adenylate kinase (EC 2.7.4.3) | swissnew\|P33107\|KAD_MICLU | 2.00E−46 |
| | | | | | (atp-amp | | |
| NO. 1034 | BL1602 | 2008408 | 2008626 | + | translation initiation factor if-1. | trembl\|U15140\|MB1540_1 | 1.00E−26 |
| | | | | | (infA) | | |
| NO. 1035 | BL1604 | 2008912 | 2009289 | + | 30s ribosomal protein s13. (rpsM) | swiss\|O06327\|RS13_MYCTU | 1.00E−52 |
| NO. 1036 | BL1605 | 2009315 | 2009812 | + | hypothetical protein with unknown | embl\|AL031317\|SC6G4 | 5.00E−24 |
| | | | | | function | | |
| NO. 1037 | BL1606 | 2009856 | 2010851 | + | dna-directed rna polymerase alpha | swiss\|O06324\|RPOA_MYCTU | 5.00E−134 |
| | | | | | chain (EC | | |
| NO. 1038 | BL1607 | 2010951 | 2011484 | + | 50s ribosomal protein l17 (rplQ) | swiss\|O86775\|RL17_STRCO | 2.00E−35 |
| NO. 1039 | BL1608 | 2011566 | 2012477 | complement | trna pseudouridine synthase a (EC | swiss\|O86776\|TRUA_STRCO | 7.00E−54 |
| | | | | | 4.2.1.70) | | |
| NO. 1040 | BL1609 | 2012753 | 2014933 | + | narrowly conserved hypothetical | trembl\|AE002040\|AE002040_9 | 5.00E−102 |
| | | | | | protein with | | |
| NO. 1041 | BL1610 | 2015140 | 2015940 | + | narrowly conserved hypothetical | trembl\|AE002037\|AE002037_7 | 4.00E−21 |
| | | | | | protein in | | |
| NO. 1042 | BL1611 | 2016516 | 2018318 | + | alpha-1-arabinofuranosidase a (EC | gp\|AL163003\|7414545 | 5.00E−162 |
| | | | | | 3.2.1.55) | | |
| NO. 1043 | BL1613 | 2018851 | 2019894 | + | laci-type tanscriptional regulator | trembl\|AE001777\|AE001777_1 | 3.00E−29 |
| NO. 1044 | BL1615 | 2020871 | 2021938 | + | n utilization substance homolog | trembl\|Z95207\|MTCY24A1_1 | 1.00E−76 |
| | | | | | (nusA) | | |
| NO. 1045 | BL1616 | 2022208 | 2025072 | + | translation initiation factor if-2 | swiss\|Q9Z519\|IF2_MYCLE | 0 |
| | | | | | (infB) | | |
| NO. 1046 | BL1617 | 2025225 | 2025698 | + | ribosome-binding factor a. (rbfA) | swiss\|Q9Z527\|RBFA_STRCO | 1.00E−25 |
| NO. 1047 | BL1618 | 2025700 | 2026863 | + | trna pseudouridine synthase b (EC | trembl\|AL035559\|SC9F2_7 | 2.00E−53 |
| | | | | | 4.2.1.70) | | |
| NO. 1048 | BL1619 | 2026961 | 2028085 | + | protein ribf [includes: riboflavin | trembl\|AL035559\|SC9F2_5 | 9.00E−41 |
| | | | | | kinase (EC | | |
| NO. 1049 | BL1620 | 2028100 | 2029638 | complement | alkylation damage repair protein | trembl\|AL049628\|SCE94_2 | 5.00E−117 |
| | | | | | (radA or sms) | | |
| NO. 1050 | BL1623 | 2030832 | 2031530 | complement | probable ribose 5-phosphate | swiss\|P72012\|RPIA_METTH | 2.00E−43 |
| | | | | | isomerase (EC | | |
| NO. 1051 | BL1624 | 2031661 | 2032647 | complement | ribonuclease h (EC 3.1.26.4) | pironly\|G82101\|G82101 | 1.00E−21 |
| | | | | | (mase h) (rnh) | | |
| NO. 1052 | BL1626 | 2033184 | 2034818 | complement | possible class i pyridine | swiss\|P77212\|YKGC_ECOLI | 1.00E−57 |
| NO. 1053 | BL1630 | 2037432 | 2039108 | complement | phosphoglucomutase (EC 5.4.2.2) | trembl\|AL158061\|SC6D11_39 | 5.00E−180 |
| | | | | | (glucose | | |
| NO. 1054 | BL1631 | 2039195 | 2040748 | complement | d-xylose-proton symporter (xylT) | swiss\|O52733\|XYLT_LACBR | 5.00E−100 |
| NO. 1055 | BL1632 | 2041248 | 2043623 | + | pts system, glucose-specific iiabc | trembl\|AF045481\|AF045481_1 | 5.00E−154 |
| | | | | | component | | |
| NO. 1056 | BL1633 | 2043641 | 2044480 | + | transcription antiterminator similar | swiss\|P39805\|LICT_BACSU | 9.00E−38 |
| | | | | | to lict | | |
| NO. 1057 | BL1634 | 2044504 | 2045883 | complement | conserved hypothetical protein | swiss\|Q55452\|Y036_SYNY3 | 7.00E−20 |
| | | | | | wish possible | | |
| NO. 1058 | BL1635 | 2045919 | 2047205 | + | seryl-trna synthetase (EC | swiss\|P96244\|SYS_MYCTU | 5.00E−126 |
| | | | | | 6.1.1.11) | | |
| NO. 1059 | BL1638 | 2048211 | 2049527 | + | solute binding protein of abc | trembl\|AL132973\|SCF91_20 | 1.00E−39 |
| | | | | | transposter for | | |
| NO. 1060 | BL1639 | 2049667 | 2050689 | + | permenase of abc transporter for | trembl\|AL158061\|SC6D11_6 | 2.00E−56 |
| | | | | | sugars | | |
| NO. 1061 | BL1640 | 2050689 | 2051639 | + | permease of abc transporter for | trembl\|AL158061\|SC6D11_5 | 3.00E−58 |
| | | | | | sugars | | |
| NO. 1062 | BL1642 | 2054142 | 2055221 | + | narrowly conserved hypothetical | trembl\|D90908\|SSD908_48 | 7.00E−55 |
| | | | | | protein wilh | | |
| NO. 1063 | BL1643 | 2055268 | 2056815 | + | galactose-1-phosphate | trembl\|AF082008\|AF082008_2 | 1.00E−72 |
| | | | | | uridylyltransferase (EC | | |
| NO. 1064 | BL1644 | 2056884 | 2057906 | + | ndp-glucose 4-epimerase (EC | swiss\|P24325\|GALE_HAEIN | 5.00E−119 |
| | | | | | 5.1.3.2) | | |
| NO. 1065 | BL1645 | 2057954 | 2058649 | complement | response regulator of two- | trembl\|AL109661\|SC6E10_14 | 1.00E−30 |
| | | | | | component system | | |
| NO. 1066 | BL1652 | 2067540 | 2068730 | complement | araj-like protein probably involved | trembl\|U73857\|ECU73857_115 | 7.00E−69 |
| | | | | | in transport | | |
| NO. 1067 | BL1654 | 2069231 | 2070913 | + | lysyl-trna synthetase 1 (EC | swissnew\|O06284\|SYK1_MYCTU | 5.00E−154 |
| | | | | | 6.1.1.6) | | |
| NO. 1068 | BL1655 | 2070975 | 2071940 | + | probable 1,4-dihydroxy-2- | swiss\|O07134\|MENA_MYCLE | 1.00E−44 |
| | | | | | naphthoate | | |
| NO. 1069 | BL1656 | 2071970 | 2072740 | + | phosphoglycerate mutase (EC | trembl\|M83661\|SCPGM_1 | 1.00E−86 |
| | | | | | 5.4.2.1) | | |
| NO. 1070 | BL1657 | 2073099 | 2073773 | complement | response regulator of two- | swissnew\|O07167\|PHU1_MYCTU | 2.00E−30 |
| | | | | | component system | | |
| NO. 1071 | BL1658 | 2073788 | 2075158 | + | histidine kinase sensor of two | gp\|AL160331\|7242750 | 6.00E−50 |
| | | | | | component | | |
| NO. 1072 | BL1660 | 2075668 | 2076810 | complement | probable phosphoserine | swissnew\|O33062\|SERC_MYCLE | 5.00E−120 |
| | | | | | aminotransferase (EC | | |
| NO. 1073 | BL1661 | 2077204 | 2078160 | + | hypothetical protein with c- | trembl\|AJ243106\|STH243106_4 | 2.00E−25 |
| | | | | | terminal homology to | | |
| NO. 1074 | BL1664 | 2080185 | 2081222 | + | widely conserved protein in | swiss\|Q10851\|YK05_MYCTU | 2.00E−26 |
| | | | | | universal stress | | |
| NO. 1075 | BL1665 | 2081894 | 2082694 | + | thymidylate synthase(EC | swiss\|O33306\|TYSY_MYCTU | 5.00E−109 |
| | | | | | 2.1.1.45) (thyA) | | |
| NO. 1076 | BL1666 | 2082804 | 2083466 | + | dihydrofolate reductase (EC | trembl\|AF006616\|AF006616_1 | 3.00E−26 |
| | | | | | 1.5.1.3) (dfrA) | | |
| NO. 1077 | BL1667 | 2083590 | 2084108 | + | law molecular weight | swissnew\|P53433\|PTPA_STRCO | 8.00E−22 |
| NO. 1078 | BL1668 | 2084287 | 2084619 | complement | branched-chain amino acid | swiss\|O07923\|AZLD_BACSU | 9.00E−37 |
| | | | | | permease (alzD) | | |
| NO. 1079 | BL1669 | 2084616 | 2085632 | complement | narrowly conserved hypothetical | swiss\|O07942\|AZLC_BACSU | 6.00E−74 |
| | | | | | protein with | | |
| NO. 1080 | BL1670 | 2085856 | 2086716 | complement | widely conserved hypothetical | swiss\|P32049\|YGGH_ECOLI | 1.00E−30 |
| | | | | | protein with | | |
| NO. 1081 | BL1671 | 2087044 | 2088057 | + | udp-glucose 4-epimerase (EC | tremblnew\|AL163672\|SCE50_16 | 1.00E−85 |
| | | | | | 5.1.3.2) | | |
| NO. 1082 | BL1672 | 2088998 | 2090302 | complement | possible cyclopropane-fatty-acyl- | trembl\|AL023596\|MLCB2407_9 | 3.00E−98 |
| | | | | | phospholipid | | |
| NO. 1083 | BL1673 | 2090742 | 2091893 | + | possible lactaldehyde reductase | swiss\|P11549\|FUCO_ECOLI | 5.00E−120 |
| | | | | | (EC 1.1.1.77) | | |
| NO. 1084 | BL1675 | 2093118 | 2094632 | + | hypothetical integral membrane | trembl\|AL020958\|SC4H8_6 | 2.00E−61 |
| | | | | | protein in | | |
| NO. 1085 | BL1676 | 2094632 | 2095855 | + | narrowly conserved hypothetical | trembl\|L39794\|PPRRMP_7 | 2.00E−25 |
| | | | | | transmembrane | | |
| NO. 1086 | BL1677 | 2095950 | 2096906 | + | atp-binding protein of abc | trembl\|AP000005\|AP000005_137 | 3.00E−40 |
| | | | | | transporter system | | |
| NO. 1087 | BL1679 | 2098599 | 2100089 | + | hypothetical secreted protein with | trembl\|AL049841\|SCE9_15 | 2.00E−30 |
| | | | | | d-ala-d-ala | | |
| NO. 1088 | BL1680 | 2100179 | 2101345 | + | narrowly conserved hypothetical | trembl\|AL049841\|SCE9_13 | 3.00E−39 |
| | | | | | protein similar | | |
| NO. 1089 | BL1681 | 2101332 | 2101895 | + | hypoxanthine-guanine | trembl\|AL049841\|SCE9_12 | 4.00E−47 |
| | | | | | phosphoribosyltransferase | | |
| NO. 1090 | BL1682 | 2101892 | 2103982 | + | atp-dependent zinc | trembl\|AL049841\|SCE9_11 | 0 |
| | | | | | metallopeptidase involved in | | |
| NO. 1091 | BL1683 | 2104077 | 2104676 | + | gtp cyclohydrolase i (EC 3.5.4.16) | swissnew\|Q9X8I3\|GCH1_STRCO | 3.00E−64 |
| | | | | | (gtp-ch-i) | | |
| NO. 1092 | BL1684 | 2104739 | 2105614 | + | dihydropteroate synthase i (EC | trembl\|AL049841\|SCE9_5 | 2.00E−58 |
| | | | | | 2.5.1.15) | | |
| NO. 1093 | BL1685 | 2105725 | 2107137 | + | probable bifunctional folate | trembl\|AL049841\|SCE9_8 | 1.00E−30 |
| | | | | | synthesis protein | | |
| NO. 1094 | BL1687 | 2107939 | 2108838 | complement | acyl-coa thioesterase ii | pironly\|A82248\|A82248 | 7.00E−39 |
| | | | | | (EC 3.1.2.—) (teii) | | |
| NO. 1095 | BL1688 | 2109150 | 2110829 | complement | atp binding protein of abc | trembl\|AL021246\|MTV008_32 | 0 |
| | | | | | transporter | | |
| NO. 1096 | BL1691 | 2111662 | 2112612 | + | glucokinase (EC 2.7.1.2) (glucose | swissnew\|P40184\|GLK_STRCO | 1.00E−70 |
| | | | | | kinase | | |
| NO. 1097 | BL1692 | 2112637 | 2113503 | complement | atp binding protein of abc | trembl\|AL009199\|SC7B7_7 | 4.00E−57 |
| | | | | | transporter for | | |
| NO. 1098 | BL1693 | 2113541 | 2114710 | complement | probable repressor protein in | trembl\|AL009199\|SC7B7_5 | 5.00E−74 |
| | | | | | (nagc/xylr) | | |
| NO. 1099 | BL1694 | 2114962 | 2116119 | + | probable sugar binding protein of | trembl\|AL133423\|SC4A7_32 | 7.00E−71 |
| | | | | | abc | | |
| NO. 1100 | BL1695 | 2116220 | 2117773 | + | atp binding protein of abc | trembl\|AF160811\|AF160811_1 | 5.00E−168 |
| | | | | | transporter for | | |
| NO. 1101 | BL1696 | 2117773 | 2118990 | + | | trembl\|AF160811\|AF160811_2 | 4.00E−89 |
| NO. 1102 | BL1699 | 2120080 | 2120502 | + | hypothetical transmembrane | trembl\|AB000617\|AB000617_2 | 5.00E−22 |
| | | | | | protein possibly | | |
| NO. 1103 | BL1700 | 2120510 | 2120929 | + | polypeptide deformylase (EC | swiss\|O08450\|DEF_CLOBE | 8.00E−32 |
| | | | | | 3.5.1.31) (pdf) | | |
| NO. 1104 | BL1704 | 2123529 | 2124878 | + | xylose isomerase (EC 5.3.1.5) | swiss\|P29443\|XYLA_LACBR | 0 |
| | | | | | (xylA) | | |
| NO. 1105 | BL1705 | 2125144 | 2126421 | + | transpsosase in is 256 family | trembl\|AF082836\|AF082836_1 | 5.00E−155 |
| NO. 1106 | BL1706 | 2126337 | 2126684 | + | possible sugar premease | trembl\|AF160811\|AF160811_2 | 9.00E−20 |
| NO. 1107 | BL1709 | 2127852 | 2129372 | complement | xylulose kinase (EC 2.7.1.17) | swiss\|P27156\|XYLB_STRRU. | 1.00E−78 |
| | | | | | (xylulokinase) | | |
| NO. 1108 | BL1710 | 2129592 | 2130821 | + | possible xylr-type repressor | trembl\|AL133210\|SCG11A_2 | 1.00E−47 |
| NO. 1109 | BL1711 | 2131150 | 2131362 | + | 50s ribosomal protein l31.(rpmE) | swiss\|Q10608\|RL31_MYCTU | 7.00E−22 |
| NO. 1110 | BL1712 | 2131516 | 2132604 | + | peptide chain release factor 1 (rf-1) | swiss\|Q10605\|RFI_MYCTU | 5.00E−104 |
| | | | | | (prfA) | | |
| NO. 1111 | BL1713 | 2132691 | 2133575 | + | possible methylase protein | swiss\|Q10602\|HEMK_MYCTU | 2.00E−34 |
| NO. 1112 | BL1714 | 2133848 | 2135035 | + | solute binding protein of abc | | 3.00E−39 |
| | | | | | transporter for | | |
| NO. 1113 | BL1715 | 2135277 | 2136203 | + | permease of abc transporter for | swiss\|P30295\|LIVH_SALTY | 2.00E−64 |
| | | | | | branched-chain | | |
| NO. 1114 | BL1716 | 2136220 | 2137296 | + | permease of abc transporter for | pironly\|A83032\|A83032 | 1.00E−47 |
| | | | | | branched-chain | | |
| NO. 1115 | BL1717 | 2137293 | 2138153 | + | atp binding protein of abc | trembl\|AE001771\|AE001771_7 | 1.00E−71 |
| | | | | | transporter for | | |
| NO. 1116 | BL1718 | 2138153 | 2138857 | + | atp binding protein of abc | trembl\|AL109732\|SC7H2_26 | 7.00E−76 |
| | | | | | transporter for | | |
| NO. 1117 | BL1719 | 2138989 | 2139666 | complement | probable sugar o-acetyltransferase | swiss\|Q09707\|YA39_SCHPO | 6.00E−36 |
| | | | | | (EC 2.3.1.18) | | |
| NO. 1118 | BL1720 | 2139841 | 2140515 | + | conserved protein in the | trembl\|AF144563\|AF144563_3 | 2.00E−23 |
| | | | | | sua5/ycio/yrdc family | | |
| NO. 1119 | BL1721 | 2140629 | 2141795 | + | possible undecaprenyl-phosphate | swiss\|P45830\|RFE_MYCLE | 1.00E−65 |
| NO. 1120 | BL1722 | 2141764 | 2143401 | + | inosine-5′-monophosphate | gp\|AL161755\|7320889 | 5.00E−171 |
| | | | | | dehydrogenase (EC | | |
| NO. 1121 | BL1723 | 2143569 | 2144219 | + | probable oligoribonuclease (EC | swissnew\|P57666\|ORN_STRCO | 8.00E−54 |
| | | | | | 3.1.—.—) (orn) | | |
| NO. 1122 | BL1724 | 2144268 | 2145686 | + | possible helicase | trembl\|AF074944\|AF074944_1 | 2.00E−55 |
| NO. 1123 | BL1726 | 2147513 | 2148685 | + | possible pyruvate formate-lyase | trembl\|Z83867\|MTCY3A2_8 | 5.00E−108 |
| | | | | | activating | | |
| NO. 1124 | BL1728 | 2149479 | 2151272 | + | prolyl-trna synthetase (EC | swiss\|O05814\|SYP_MYCTU | 5.00E−176 |
| | | | | | 6.1.1.15) | | |
| NO. 1125 | BL1730 | 2152374 | 2154611 | complement | belongs to peptidase family m13 | trembl\|AL021928\|MTV033_5 | 5.00E−165 |
| | | | | | (zinc | | |
| NO. 1126 | BL1732 | 2155895 | 2156677 | + | methionine aminopeptidase (EC | trembl\|AL023861\|SC3C8_28 | 1.00E−65 |
| | | | | | 3.4.11.18) (map) | | |
| NO. 1127 | BL1733 | 2156951 | 2158243 | + | citrate synthase 1 (EC 4.1.3.7) | swiss\|Q10530\|CISY_MYCTU | 5.00E−124 |
| | | | | | (gltA2) | | |
| NO. 1128 | BL1734 | 2158457 | 2159476 | complement | widely conserved hypothetical | trembl\|Z93777\|MTCI364_11 | 3.00E−84 |
| | | | | | protein with | | |
| NO. 1129 | BL1736 | 2160873 | 2165057 | + | possible helicase | trembl\|X98455\|BCX98455_2 | 5.00E−108 |
| NO. 1130 | BL1738 | 2165706 | 2166305 | complement | hypothetical protein with probable | tremblnew\|AJ251800\|STH251800_1 | 7.00E−25 |
| NO. 1131 | BL1739 | 2166307 | 2166822 | + | possible xorii very-short-patch- | swissnew\|Q9JWD6\|VSR_NEIMA | 3.00E−34 |
| | | | | | repair | | |
| NO. 1132 | BL1740 | 2166853 | 2167908 | complement | probable oxidoreductase | trembl\|AL133220\|SCC75A_31 | 3.00E−46 |
| NO. 1133 | BL1741 | 2168002 | 2169225 | + | probable aspartate | pironly\|D83057\|D83057 | 6.00E−87 |
| | | | | | aminotransferase | | |
| NO. 1134 | BL1742 | 2169403 | 2170371 | + | widely conserved hypothetical | trembl\|AL049819\|SCE7_15 | 1.00E−80 |
| | | | | | protein with | | |
| NO. 1135 | BL1748 | 2173544 | 2175409 | + | probable long-chain-fatty-acid- | trembl\|AL049497\|SC6G10_4 | 5.00E−136 |
| | | | | | coa ligase (EC | | |
| NO. 1136 | BL1749 | 2175548 | 2176072 | complement | possible nad(p)h oxidoreductase | swiss\|P54439\|YRKL_BACSU | 7.00E−36 |
| | | | | | (EC 1.6.99.—) | | |
| NO. 1137 | BL1751 | 2176548 | 2177918 | complement | exonuclease vii, large subunit | tremblnew\|AL391754\|SCK7_29 | 2.00E−88 |
| | | | | | (EC 3.1.11.6) | | |
| NO. 1138 | BL1752 | 2178386 | 2180794 | + | anaerobic ribonucleoside- | trembl\|U73336\|U73336_1 | 0 |
| | | | | | triphosphate reductase | | |
| NO. 1139 | BL1753 | 2180861 | 2181670 | + | anaerobic ribonucleoside- | trembl\|U73336\|U73336_2 | 7.00E−64 |
| | | | | | triphosphate reductase | | |
| NO. 1140 | BL1754 | 2181898 | 2187036 | + | long hypothetical protein with | trembl\|AE000682\|AE000682_3 | 2.00E−73 |
| | | | | | unknown function | | |
| NO. 1141 | BL1755 | 2187342 | 2188478 | + | possible glutamate-cysteine | trembl\|AF128454\|AF128454_1 | 3.00E−33 |
| | | | | | ligase, (EC | | |
| NO. 1142 | BL1757 | 2189465 | 2191828 | + | possible beta-glucosidase (EC | trembl\|AF006658\|BFAF6658_1 | 5.00E−119 |
| | | | | | 3.2.1.21) | | |
| NO. 1143 | BL1761 | 2192953 | 2194167 | + | probable beta-1,3-exoglucanase | tremblnew\|AY005434\|AY005434_1 | 5.00E−37 |
| NO. 1144 | BL1763 | 2194834 | 2195973 | + | possible beta-glucosidase b (EC | trembl\|U92808\|U92808_1 | 1.00E−58 |
| | | | | | 3.2.1.21) | | |
| NO. 1145 | BL1766 | 2197109 | 2199067 | + | atp-binding protein of abc | trembl\|AE001710\|AE001710_10 | 5.00E−114 |
| | | | | | transporter | | |
| NO. 1146 | BL1767 | 2199064 | 2201079 | + | abc transporter, atp-binding | tremblnew\|AP001509\| | 5.00E−110 |
| | | | | | transmembrane | AP001509_253 | |
| NO. 1147 | BL1768 | 2201259 | 2202284 | + | probable laci-type transcriptional | trembl\|AL136519\|SCC57A_15 | 4.00E−43 |
| | | | | | regulator | | |
| NO. 1148 | BL1770 | 2202998 | 2203918 | + | widely conserved hypothetical | tremblnew\|AE005179\|AE005179_9 | 8.00E−74 |
| | | | | | protein in the | | |
| NO. 1149 | BL1771 | 2204020 | 2205450 | + | c4-dicarboxylate transporter | pironly\|G82431\|G82431 | 3.00E−65 |
| | | | | | (dcuC) | | |
| NO. 1150 | BL1772 | 2205676 | 2206644 | + | sugar kinase in pfkb family | trembl\|AL136519\|SCC57A_18 | 2.00E−43 |
| | | | | | (rbsK) | | |
| NO. 1151 | BL1774 | 2207174 | 2208181 | + | laci-type transcriptional regulator | tremblnew\|AP001514\|AP001514_24 | 2.00E−58 |
| NO. 1152 | BL1775 | 2208244 | 2208846 | complement | fragment of beta galactosidase | trembl\|AJ242596\|BLO242596_1 | 3.00E−62 |
| NO. 1153 | BL1776 | 2208904 | 2210115 | complement | probable aminotransferase | swiss\|Q08432\|PATB_BACSU | 4.00E−54 |
| NO. 1154 | BL1777 | 2210709 | 2214020 | + | isoleucyl-trna synthetase (EC | swiss\|Q10765\|SYI_MYCTU | 0 |
| | | | | | 6.1.1.5) | | |
| NO. 1155 | BL1778 | 2214216 | 2214866 | + | truncated type i restriction system | embl\|I46882\|I46882 | 2.00E−51 |
| | | | | | specificity | | |
| NO. 1156 | BL1779 | 2214859 | 2215788 | complement | phage family integrase | trembl\|L44593\|LLATTP_8 | 2.00E−51 |
| NO. 1157 | BL1780 | 2215779 | 2216348 | complement | truncated type i restriction system | trembl\|AF153410\|AF153410_1 | 2.00E−54 |
| | | | | | specificity | | |
| NO. 1158 | BL1781 | 2216382 | 2217317 | + | our restriction endonuclense (mrr) | trembl\|Z83863\|MTCY159_5 | 2.00E−50 |
| NO. 1159 | BL1782 | 2217349 | 2219916 | + | modification (methylase) protein | trembl\|AF177167\|AF177167_4 | 5.00E−103 |
| | | | | | of type i | | |
| NO. 1160 | BL1783 | 2219916 | 2221136 | + | hsds specificity protein of type i | trembl\|AF027167\|AF027167_1 | 1.00E−66 |
| | | | | | restriction- | | |
| NO. 1161 | BL1785 | 2222715 | 2226002 | + | hsdr-like protein of type i | trembl\|AF013165\|AF013165_2 | 7.00E−93 |
| | | | | | restriction | | |
| NO. 1162 | BL1786 | 2226070 | 2227290 | complement | s-adenosylmethionine synthetase | tremblnew\|AX063959\|AX063959_1 | 5.00E−136 |
| | | | | | (EC 2.5.1.6) | | |
| NO. 1163 | BL1788 | 2228055 | 2229917 | + | dihydroxy-acid dehydratase (EC | swissnew\|O69198\|ILVD_STRCO | 0 |
| | | | | | 4.2.1.9) (dad) | | |
| NO. 1164 | BL1789 | 2230008 | 2230994 | complement | methionyl-trna formyltransferase | gp\|AL159139\|7209233 | 2.00E−80 |
| | | | | | (EC 2.1.2.9) | | |
| NO. 1165 | BL1791 | 2231781 | 2234093 | complement | probable primosomal protein n' | gp\|AL159139\|7209235 | 3.00E−72 |
| | | | | | (replication | | |
| NO. 1166 | BL1792 | 2234133 | 2234885 | complement | probable phosphoserine | trembl\|AL096844\|SCI28_2 | 3.00E−49 |
| | | | | | phosphatase (EC 3.1.3.3) | | |
| NO. 1167 | BL1793 | 2234906 | 2235604 | + | hypothetical conserved | trembl\|D64004\|SSSLRF_46 | 4.00E−38 |
| | | | | | transmembrane protein in | | |
| NO. 1168 | BL1794 | 2235665 | 2237230 | + | probable aaa-family atpase | swiss\|O33250\|YL15_MYCTU | 5.00E−114 |
| NO. 1169 | BL1795 | 2237252 | 2238919 | + | hypothetical proteasome- | trembl\|Z97559\|MTCY261_8 | 6.00E−95 |
| | | | | | associated protein | | |
| NO. 1170 | BL1797 | 2240121 | 2241581 | + | hypothetical proteasome- | trembl\|AL035310\|MLCB2533_19 | 4.00E−88 |
| | | | | | associated protein | | |
| NO. 1171 | BL1799 | 2242124 | 2244685 | complement | narrowly conserved hypothetical | trembl\|AL021942\|MTV039_22 | 3.00E−54 |
| | | | | | membrane | | |
| NO. 1172 | BL1800 | 2244817 | 2246262 | complement | adenylosuccinate lyase (EC | pironly\|A82237\|A82237 | 5.00E−111 |
| | | | | | 4.3.2.2) | | |
| NO. 1173 | BL1811 | 2254166 | 2255254 | complement | widely conserved moxr-like | pironly\|C83106\|C83106 | 4.00E−72 |
| | | | | | protein in magnesium | | |
| NO. 1174 | BL1812 | 2255285 | 2255926 | complement | Uracil-dna glycosylase | swiss\|P95119\|UNG_MYCTU | 2.00E−77 |
| | | | | | (EC 3.2.2.—) (udg) (ung) | | |

[0038] The ORFs corresponding to NO. 1 to 1147 nucleotide sequences are defined in table 1, supra, and are represented by their position in the genomic sequence SEQ. ID. NO. 1. For example, the ORF3 sequence is defined by the nucleotide sequence between the nucleotides at position 4622 and 6472 on the sequence SEQ No. 1, ends included.

[0039] The open reading frames have been identified via homology analyses as well as via analyses of potential ORF start sites. It is to be understood that each identified ORF comprises a nucleotide sequence that spans the contiguous nucleotide sequence from the codon immediately 3′ to the stop codon of the preceding ORF and through the 5′ codon to the next stop codon of SEQ. ID. NO. 1 in frame to the ORF nucleotide sequence.

[0040] Table 1 also depicts the results of homology searches that compared the sequences of the polypeptides encoded by each of the ORFs to sequences present in public published databases. It is understood that in one embodiment, those polypeptides listed in Table 1 as exhibiting greater than about 99% identity to a polypeptide present in a publicly disclosed database are not considered part of the present invention. Likewise in this embodiment, those nucleotide sequences encoding such polypeptides are not considered part of the invention.

[0041] As regards the homology with the ORF nucleotide sequences, the homologous sequences exhibiting a percentage identity with the bases of one of the ORF nucleotide sequences of at least 80%, preferably 90% and 95%, are preferred. Such homologous sequences are identified via, for example, the algorithms described above and in the examples below. The said homologous sequences correspond to the homologous sequences as defined above and may comprise, for example, the sequences corresponding to the ORF sequences of a bacterium belonging to the Bifidobacterium family.

[0042] These homologous sequences may likewise correspond to variations linked to mutations within the same species or between species and may correspond in particular to truncations, substitutions, deletions and/or additions of at least one nucleotide. The said homologous sequences may also correspond to variations linked to the degeneracy of the genetic code or to a bias in the genetic code which is specific to the family, to the species or to the variant and which are likely to be present in Bifidobacterium.

[0043] Particularly interesting sequences are nucleotide sequences, which encode the following polypeptides or fragments thereof:

(a) SEQ. ID. NO.5 (ORF13)
MPTGRVRWFDAAKGYGFITSEEGKDVFLPAQALPTGVTTLRKGAKVEYSV
VDGRRGPQAMDVRLIASAPSLVKATRPKADDMAAICEDLIKMLDAAGNTL
RRHRYPSAADSKKLATLLRAVADQFDVQD
(b) SEQ. ID. NO.525 (ORF1827)
MTTAAAQAPAPGKLEFKDDYTPDEAERVIRNSKGLPVGVRPKMVWTWKKA
LLWAAIAIVCACGWAILAVSRGEQISAIWFLVVALSSYAIAYRFYAYYIQ
IKIMRTDDANATPAERVHDGANFERTDRRVLFGQHFAGISGAGPLVGPIL
AAQMGYLPSTLWIILGVIFAGAVQDMLVLWISAKRRGRSLGQMATDEMGK
FGGMILSIFLVVMTAIAMAFLALVAIKAMAASPWAVFSIGMTIPIALIMG
CYQRFLRPGRVIETTLLGFVLLVLDIVAGGWIASIPAVAAVFTLDAKQLV
IALVIYSFAAAALPHWLLVTPRDYLSTLMKIGTLVLLVIGIIIANPSVKV
PGLTELASTSTGPTFSGNLFPFLFITIACGALSGFHGAVSSGLTPKAVEK
ENQIRMIGYGSMLVESFTAVIALIAAITISQGVYFSTNMSAAQITAASGV
SISATSTPGEQADAAVKAVESMKVSDIEGNQMQVTWDSVDENGAAKTYEG
AAALEQAAADIGETSIVSRTGGATTFAMGMANFLKSYLGGHDSMAFWYHF
AIMFEALFILTTVDNGTRVARYQIGEMLGNVRKLKKFADPTWKPGN
IITTLIATALWGGLLWMGVSDANGGINAMVPIFGISNQLLAAACFV
LITVCVAKMGYWKHLWIPVVPLVWDIAVTFTADFQKIFGPLSYFTT
ASKYQAQIDSGELTGEALTNAKAALSNAYLDGVLSVFFLVMMGVFV
VVGIVVVARTFAAGKYGAETTSEEPFVESQWFAPSSLVATALEKKV
QREYSAKLHELVRNGQVAA
c) SEQ. ID. NO.424 (ORF1473)
MTQSRRMLVLRAVVEDYIRSQEPVGSTSLTRDHDLGVSSATIRNDMAALE
DEGYLIQPHTSAGRVPTEKGYRYFVDRLATVVPLSEAQRRGINSFLSGSV
SLKDALQRSARLLSEITGQVAVVASPSLAKATLRHVEMVPVAMTTLLAVV
ITDTGRVAQHGLTIASMPAVDEINRLSNTVNEQCDGLSLSKSAETVRSIA
ASAGYESVRGVADTLADAFESMALDERANELYMSGTSHLAHSRSLADLAP
LFDALEEQVVLMKLMSNLSEETNASGVGVAIGSEMHTPGLLHASVVSSGY
GRSGAAGEPAGNDPVGEPETESETESQTNDTEPIAFVGSIGPTHMDYAAT
MAAVRAVARYLTAFLSEGRTQD
d) SEQ. ID. NO.548 (ORF1905)
MYFKDGNDNAQRGGSTVRRSRQRRIMGRVVSYNEDVPRCTFCGKTEHQVR
KLVAGPNASICDECIALCVDIISEERVKDAEVNSLSLPKPAQIFDYLNRY
VIGQENAKRALSVAVYNHYKRVNMELQESAEQLDGNNGHSGQTSKQAKQS
VPTQTRATRRSNDPLADVEVAKSNILLLGPTGVGKTYLAQALARVMNVPF
VITDATTLTEAGYVGDDVETVLQRLLQAADGDVSRAQHGIIYIDEIDKIA
RKSGENTSITRDVSGEGVQQALLKILEGTIASVPLEGTRKHKEQDVAQMD
TRGILFICGGAFVGLTDIVRKRLGRRETGFGANWHDADMKDEELLEQVNA
DDLAEFGLLPEFIGRLPVTSVLKELTVDDLTAILTQPANALIKQYRKLFA
VDGVDLQFTEQAIRAIADIAIKQGTGARGLRSIIERTLQDTMFQLPSLDD
VRQVIVDKASVEGSSTPKLLREAVDVPQGRLKVAQSVLLDRVRTHEA
e) SEQ. ID. NO.74 (ORF219)
MSEQLMEQYRLRGQRKCRNACIAAIVTVVLVLAVAGGVWWTAGDGSALVR
NMFKPKATPATQPVVNSTATFAYRTAPEFLAMEAGDRGTGNVNYSPASMW
MALAIAAQGANGTTRSQLNELLGSGSLTDSDYQSLLSSINGQYSGAKSEM
SAANSLWIDDDYSLASDYQSTVKKMFEAEVTTLPFDDQAAAKMSDWIAKH
TNGSLKPKITLRDREVLSIINTVYADGRWKDPFEEQSTGNGTFHGEAGDA
QVPMMHQTFSQMAYGHDEYNTWQRVEIPFDNGGNLAIVLPAEGHFDELAG
DAEKLSWAFGTCSTASLGEGAMGCAADSMPGWGVSVNSVMVNVTLPRFTI
DSMFDSEATIKAFEKLGVTDAFSAGDADFTKMIDTGSHGENLYIGSILQG
TRIEVNEAGAKAMSFTKVGADSVSAPVDNVEFTVDRPFLYSYVTPDGIPL
FIGAVRNLGGVGGEN
f) SEQ. ID. NO.576 (ORF1972)
MQIRPGSMYPLGASYDGAGVNFALYSQVAQKVELCLFDEHDVETRIEMTE
RNSYVWHNYIPGLHPGQRYGYRVYGPYDPVHGLRCNPNKLLLDPYAKAIE
GNIDGDESLFSYWFKSPDDNSAMNDLDSAAHTMKSAVINPYFDWGNDQHP
YISYHDSVIYEAHVRGMTNLNMDVPPDIRGTYAGLAYPSVIEYLKKLGIT
AIELMPIHQFVNDSFLQEKGLSNYWGYNTIGFFAPHNAYSSSGERGEQVN
EFKSMVKAYHRAGMEVILDVVYNHTAEGNHMGPTLSFKGIDNASYYRLVE
GDQQHYFDTTGTGNSLLMRSPHALQLITDSLRYWVTEMHVDGFRFDLAAT
LARQFQEVDKLSAFFDIVEQDPIISRVKLIAEPWDLGSGGYQVGGFPSSW
SEWNGRYRDTVRDFWRSQPSTLPEFASRLMGSSDLYQVNGRRPVASVNFI
TAHDGFTMNDLVSYNEKHNEANGEGNRDGESNNRSWNCGVEGPTNIPDVN
DLRQRQMRNMFATLLFSQGIPMICGGDEVARTQQGNNNAYCQDNEISWTN
WHLDKGRKELLAFVSKLIHLRLDHPVLHRRRFFTGREPGDDSNTIPQVEW
FDHTGSIMDMDDWQNTHAFSMMIYLNGSDIPEVDWYGNRMVDNDFILIFN
AHYEPIMFTLPDERYGRKWQLVVDTHNPNEPALSYEAGFMITAQSRSFLM
LMSAKKPKKPMGL
g) SEQ. ID. NO.403 (ORF1403)
MEIRARPHMASGSYRELFSARMMYGMQYIQQTIVGIDGSEARFFGYVADN
SEEMEPDRIRPAILILPGGGYAMTSDREAEPVALQFLAKGFAVFVLRYSV
QPSRYPVALLEAAEAMRLIRANVDQWHVNPAQVAVLGFSAGGHLAANLAT
SVGDEDIREQGGMDPDAVRPNALMLSYPVITAGKYAHRGSFQCLLGDQAH
NQALLDKFSIEKHIDAKTPPVFVWHTMTDDAVPVENTLMLIQACRAAGVS
IEAHLFPEGSHGLSLANAETAGNGFYAHIVECVQCWPDLAEAWLRRLF
(h) SEQ. ID. NO.804 (ORF2676)
MFLKPEQQLERCRRIVRQRVDPHIHPSIAQLTVESYDIPGEPMPSDEFFA
KLDRGDIDFKPFMLGSEWGTTWGTVWFRLTGTVPAGYPKGKPLELILDLG
WYPHSCGGHIEGLVYRADGTAIKAVHPLNYWVPFMDAEGNAQVPVAEDGS
FTLYLEAASNPLLLGVPPFIETELGDHATGKPDEPYVFKSADLAEFDERY
ENYSVDLDVVSSLMEFADKQSPRYWQLAKALQRSLNAYDERNPESVEAAR
AVLAGVLAKPANASAMNVSAIGHAHIDSAWLWPVRETRRKVARTVSNALA
LMDADPDFKYAMSSAQQYAWLEEDHPDIFKRMKRRIEEGRFIPVGGMWVE
ADGMLPAGESLIRQIAYGRKYFKEHLGVEPKGVWLPDSFGYTGAWPQIAR
RAGYEWFLTQKISWNDTTKFPHHSFMWEGIDGSRIFTHFPPADTYAAWCK
VQELDYAEKNFQDKDLSDRSLLLFGFGDGGGGPTRNMMEHLHRYENLEGV
SKVSIEEPNDFFDKAHQQLAENAGPEMPVWKGELYLELHRGTLTSQQDMK
RGCRQEESLLRTVEYLGAAAVLSDPEYVYPREELDRIWKTLLLNQFHDIL
PGSAIAWVHREAREDYRRDLKRLAEIAQDMCAVLRKANPQADLLAEARIS
QFRNDGASWHANRINEPTDALSVLTQTLDNGRVLLANGVLSVTIEADGTI
SSLLDEEHGRELVPAGTRLGQYELLRDEPAVWDAWEIERESLLMANAVTG
SIESVNTENGAAQVHVHTADGDTVITTTITLRPGSHTLDFHADIDWHERE
RFLKVDLPLGIVADQATYDCQYGLIRRPIVKNTASDEAKYESSTNRFAII
GDAGYAAAVINGSVYGSDASPIAGNAAEGRDSGTMFRLSLLSAPTFPDPR
TDIGSHEFDWSVVADATVDRALDAAGVLNAPVLHDVPDITPLASIESVNG
TVVLDWMKLADDGSGDLIVRAYEAAGGQADAMLHVCPALAGASVHETNVL
EGDDLAADLPVALQDGRQNAEGATLHFGPFQLATLRITR
(i) SEQ. ID. NO.313 (ORF1077)
MISRDGWAVIDDSAANIIIETDTVNGKANPFGTWVSPPATAETDLYFFGY
GHRYIEAVRDFYRLTGPTPLLPRFAMGNWWSRYYRYTQDGYLALMDRFKR
EGIPFTTSVIDMDWHRVDDVDPKYGSGWTGYSWNRELFPDPPAFLADLHR
RGLRTTLNVHPRDGVRAFEDAYPEVAKRVGIDPATEENVEFDLTNPDFVD
AYFDMHHRMEAEGVDFWWLDWQQGGVTRQKGLDPLWMLNHMHYLDSGRGG
NWPLTFSRYAGPGSHRYPVGFSGDTIVTWESLAFQPQFTATASNIGYGWW
SHDIGGHMFGYRNEELEARWYQLGAFSPINRLHSSNSPFSGKEPWNFNRD
VSAAMVDALRLRHAMMPYLYTMNYRAAEAGRPLVEPMYWQNPDTPDAYEV
PDEFRFGTELVVAPIVSPDDAAACRGRADAWLPQGEWFDFFDGRRYVSSD
AAGRRLEVWRSLDRTPVFAKAGAIVPLQDVAESGEAINSIANPQALRVLV
FPGADGSFVMREDRGTWGAPSADTAIAFTWGGADASPSAFTVAPVTGDTS
AVPELRDWTVVFRGVAPVDAASGVRAWSGEAPVEATVAYDEATMSLTVSV
TGISSAASLRIEIPGGLRIADNPVESDAMDLLLHAQMLYRTKELALQAVH
KLGIGAIGALRTMNRGPRYANDFWITDMPDAVAGALEEILLRS

[0044] It will be understood that the sequence information contained in the present application may be utilized for selecting a polynucleotide of interest, i.e. a nucleic acid containing an open reading frame encoding a known or an unknown, putative polypeptide and transforming micro-organisms with the selected polynucleotide. As transformation vehicles the well known plasmids, phage vectors (transfection) or F-vectors (conjugation) may be utilized. The nucleic acid introduced into the micro-organism selected may be expressed and its biological function may be either utilized as such, if known, or elucidated, in case a so far unknown polypeptide is expressed. The micro-organism selected may be a Bifidobacterium itself or other well known micro-organisms, such as bacteria, e.g. E. coli, Lactobacilli, Streptococci or yeast, insect cells or even-animal and plant cells.

[0045] It will be understood that the polypeptide may be expressed as such or as a fusion polypeptide. The skilled person is well aquatinted with techniques performing such a ligation and expressing the corresponding fusion-polypeptide in an appropriate cell.

[0046] In view of the present invention also new recombinant vectors for the cloning and/or the expression of a nucleotide sequence according to the present invention may be devised. The vectors comprise elements necessary to enable expression and/or secretion of the nucleotide sequences in a given host cell, such as a promoter, signals for initiation and for termination of translation, as well as appropriate regions for regulation of transcription. For example, expression of a protein or peptide may be controlled by any promoter/enhancer element known in the art. Exemplary promotors are the CMV promoter, the SV40 early promoter region, the promoter contained in the 3′ long terminal repeat of the rous sarcoma virus, the herpes thymidine kinase promoter, the regulatory sequences of the metallothionein gene, or, for prokaryotic expression systems, the β-lactamase promoter, the tac promoter or the T7 promoter.

[0047] The vector should be capable of being stably maintained in the host cell and may optionally possess particular signals specifying the secretion of the translated protein. These different elements are chosen according to the host cell utilized. To this effect the nucleotide sequences according to the invention may be inserted into autonomously-replicating vectors within the chosen host, or integrative vectors in the chosen host, such as e.g yeast artificial chromosomes, plasmids or viral vectors. It will be appreciated that the vector may well be the plasmid according to SEQ. ID. NO. 2 or a recombinant form thereof, which has been supplemented by particular ori's that enable a high copy number.

[0048] Any of the standard methods known to those skilled in the art for inserting DNA fragments into a vector may be used to construct expression vectors containing a chimeric gene consisting of appropriate transcriptional/translational control signals and the protein coding sequences. These methods may include in vitro recombinant DNA and synthetic techniques and in vivo recombinants (genetic recombination).

[0049] The vector may be used for transcripton and/or translation of a nucleic acid comprised in/by SEQ. ID. NO. 1 or SEQ. ID. NO. 2, to produce RNA or antisense RNA, respectively. Such a vector can remain episomal or become chromosomally integrated, as long as it can be transcribed to produce the desired transcript.

[0050] The antisense nucleic acids of the invention comprise a sequence complementary to at least a portion of a RNA transcript of a polynucleotide sequence in SEQ. ID. NO. 1, designating a sequence having sufficient complementarity to be able to hybridize with the RNA, forming a stable duplex. In the case of double-stranded antisense nucleic acid sequence, a single strand of the duplex DNA may thus be tested, or triplex formation may be assayed.

[0051] The invention also encompasses host cells transformed with a nucleic acid or a vector according to the present invention and as described above. These cells may be obtained by introducing into an appropriate cell a nucleotide sequence or a vector as defined above, and then culturing the said cell under conditions allowing the replication and/or the expression of the transformed/transfected nucleotide sequence.

[0052] The host cell may be chosen from eukaryotic or prokaryotic system, such as for example bacterial cells, yeast cells, animal cells as well as plant cells. In the context of this invention a cell shall be understood to comprise higher biological systems. Such as animals, whole plants or parts thereof. Furthermore, a host cell strain may be chosen which modulates the expression of the inserted sequences, or modifies and processes the gene product in the specific fashion desired.

[0053] A preferred host cell for the expression of the proteins of the invention consists of prokaryotic cells, such as gram negative or gram positive bacteria. A further preferred host cell according to the invention is a bacterium belonging to the Bifidobacterium family, more preferably belonging to the species Bifidobacterium longum or chosen from a microorganism associated with the species Bifidobacterium longum.

[0054] The transformed/transfected cells according to the invention may advantageously serve as a model and may be used in methods for studying, identifying and/or selecting compounds capable of being responsible for any of the beneficial effects brought about by the present Bifidobacterium strain.

[0055] The invention further provides polypeptides encoded by the Bifidobacterium longum ORFs, in particular those listed in table 1 and identified in the sequence listings. In the present description, the terms polypeptide, peptide and protein are used interchangeably. Furthermore the present invention also pertains to method for preparing such polypeptides by recombinant means comprising the steps of (a) culturing a host cell according to the present invention under conditions suitable to produce the polypeptide encoded by the polynucleotide; and (b) recovering the polypeptide from the culture.

[0056] It will be appreciated that the above polypeptides may also be obtained using combinatory chemistry, wherein the polypeptide is modified at some locations before testing them in model systems, so as to select the compounds which are the most active or which exhibit the desired properties.

[0057] In this context, chemical synthesis has the advantage of being able to use non-natural amino acids or nonpeptide bonds. Accordingly, in order to e.g. extend the life of the polypeptides according to the invention, it may be advantageous to use such non-natural amino acids, for example in the D form, or alternatively amino acid analogues, preferably sulphur-containing forms.

[0058] Finally, the structure of the polypeptides according to the invention, its homologous or modified forms, as well as the corresponding fragments may be integrated into chemical structures of the polypeptide type and the like. Accordingly, in order to preserve the polypeptide in an in vivo environment it will be preferred to provide at the N- and C-terminal ends compounds which convey a resistance to degradation to proteases.

[0059] It will also be appreciated that the different polypeptides according to the present invention and produced by the above method may represent antigens to the immune system of a host animal, so that antibodies may be produced directed against said polypeptides. These antibodies may be used for the detection of a polypeptide of interest in a mixture or generically of a strain of Bifidobacterium in a sample. In addition they may be used as research tools by e.g. producing antibodies against cellular surface epitopes and determining the effect of blocking certains polypeptides on the bacterial cell wall. Therefore, according to another aspect, the invention provides antibodies directed to epitopes on the various polypeptides provided by this invention.

[0060] According to another aspect the present invention also provides a method for the detection and/or identification of Bifidobacterium longum in a biological sample. This method may comprise several techniques known in the art, such as PCR or simply hybridisation with a suitable probe.

[0061] Alternatively, an antibody raised against a cell wall epitope of Bifidobacterium longum may be used for said purpose. It will be appreciated that the above method may also be reversed and the presence of antibodies against Bifidobacterium may be determined by contacting the sample to be tested with a polypeptide of Bifidobacterium under conditions to allow formation of immune complexes.

[0062] The polypeptides according to the invention, the antibodies according to the invention described below and the nucleotide sequences according to the invention may be used in in vitro and/or in vivo methods for the detection and/or the identification of bacteria belonging to the species Bifidobacterium in a biological sample (biological tissue or fluid) which is likely to contain them. These methods, depending on the specificity of the polypeptides, of the antibodies and of the nucleotide sequences according to the invention which will be used, may detect and/or identify the bacterial variants belonging to the species Bifidobacterium as well as associated microorganisms capable of being detected by the polypeptides, the antibodies and the nucleotide sequences according to the invention which will be chosen. It may, for example, be advantageous to choose a polypeptide, an antibody or a nucleotide sequence according to the invention, which is capable of detecting any bacterium of the Bifidobacterium family by choosing a polypeptide, an antibody and/or a nucleotide sequence according to the invention which is specific to the family.

[0063] All the sequences referred to herein (SEQ ID. NO. 1 and SEQ ID. NO. 2) are listed in the attached sequence listings which is to be considered as part of the specification.

[0064] The invention also comprises the nucleotide sequences or polypeptides according to the invention covalently or noncovalently immobilized on a solid support. In the first case such a support may serve to capture, through specific hybridization, the target nucleic acid obtained from a biological sample to be tested. If necessary, the solid support is separated from the sample and the hybridization complex formed between the capture probe and the target nucleic acid is then detected by means of a second probe, called detection probe, labelled with an easily detectable element.

[0065] Such support may take the form of so-called DNA array or DNA chips, a multitude of molecular probes precisely organized or arrayed on a solid support, which will allow sequencing genes, studies of mutations contained therein and the expression of genes, and which are currently of interest given their very small size and their high capacity in terms of number of analyses.

[0066] The function of these arrays/chips is based on molecular probes, mainly oligonucleotides which are attached to a carrier having a size of generally a few square centimetres or more as desired. For an analysis the carrier (DNA array/chip) is coated with probes that are arranged at a predetermined location of the carrier. A sample containing fragments of a target nucleic acid to be analysed, for example DNA or RNA or cDNA, that has been labelled beforehand, is subsequently contacted with the DNA array/chip leading to the formation, through hybridization, of a duplex. After a washing step, analysis of the surface of the chip allows the effective hybridizations to be located by means of the signals emitted by the labels tagging the target. A hybridization fingerprint results from this analysis which, by appropriate computer processing, allows to retrieve information such as the expression of genes, the presence of specific fragments in the sample, the determination of sequences and the presence of mutations.

[0067] The hybridization between the probes of the invention, deposited or synthesized in situ on the DNA chips, and the sample to be analysed, may, e.g. be determined by means of fluorescence, radioactivity or by electronic detection.

[0068] The nucleotide sequences according to the invention may be used in DNA arrays/chips to carry out analyses of the expression of the Bifidobacterium genes. This analysis is based on DNA arrays/chips on which probes, chosen for their specificity to characterize a given gene, are present. The target sequences to be analysed are labelled before being hybridized onto the chip. After washing the labelled compounds are detected and quantified, with the hybridizations being carried out at least in duplicate. Comparative analyses of the signal intensities obtained with respect to the same probe for different samples and/or for different probes with the same sample, determine a differential transcription of RNA derived from the sample.

[0069] The DNA arrays/chips according to the present invention may also contain nucleotide probes specific for other microorganisms, which will enable a serial testing allowing rapid identification of the presence of a microorganism in a sample.

[0070] The principle of the DNA chip, as detailed above may also be used to produce protein chips on which the support has been coated with a polypeptide or an antibody according to the invention, or arrays thereof, in place of the DNA. These protein chips make it possible to analyse the biomolecular interactions (BIA) induced by the affinity capture of target analytes onto a support coated e.g. with proteins, by surface plasma resonance (SPR). The polypeptides or antibodies according to the invention, capable of specifically binding antibodies or polypeptides derived from the sample to be analysed, may thus be used in protein chips for the detection and/or the identification of proteins in samples.

[0071] The present invention also relates to a computer readable medium having recorded thereon one or more nucleotide and/or a polypeptide sequences according to the invention. This medium may also comprise additional information extracted from the present invention, such as e.g. analogies with already known sequences and/or information relating to the nucleotide and/or polypeptide sequences of other microorganisms so as to facilitate the comparative analysis and the exploitation of the results obtained. Preferred media are e.g. magnetic, optical, electrical and hybrid media such as, for example, floppy disks, CD-ROMs or recording cassettes.

[0072] The invention also relates to kits or sets for the detection and/or the identification of bacteria belonging to the species Bifidobacterium longum or to associated microorganisms, which comprises, a polypeptide according to the invention, where appropriate, the reagents for constituting the medium appropriate for the immunological or specific reaction, the reagents allowing the detection of the antigen-antibody complexes produced by the immunological reaction between the polypeptide (s) of the invention and the antibodies which may be present in the biological sample, it being possible for these reagents also to carry a label, or to be capable of being recognized in turn by a labelled reagent, more particularly in the case where the polypeptide according to the invention is not labelled, a reference biological sample (negative control) free of antibodies recognized by a polypeptide according to the invention, a reference biological sample (positive control) containing a predetermined quantity of antibodies recognized by a polypeptide according to the invention.

[0073] The invention also relates to a kit or set for the detection and/or the identification of bacteria belonging to the species Bifidobacterium longum or to an associated microorganism, or for the detection and/or the identification of a microorganism, wherein the kit comprises a protein chip according to the invention.

[0074] The novel microorganism termed NCC2705, described herein by way of its genomic sequences, has been deposited according to the Budapest Treaty with the Institute Pasteur on Jan. 29^{th}, 2001 and received the deposit no. CNCM I-2618. This micro-organism belongs to the genus Bifidobacterium, species Bifidobacterium longum and is a probiotc micro-organism, i.e. it may pass the gastrointestinal tract in an essentially live and viable form and has the capability of preventing colonization of the intestine with pathogenic bacteria causing diarrhea and in addition may prevent or reduce the occurence of infection of intestinal cells by rotaviruses.

[0075] The microorganism is gram positive, catalase negative and CO₂ production negative, it produces L(+) lactic acid and essentially prevents colonization of intestinal cells by bacteria bringing about diarrhea, such as pathogenic E. coli, e.g. enteropathogenic E. coli (SPEC), or salmonella, e.g. Salmonella typhimurium and prevents infection of intestinal cells by rotaviruses.

[0076] The novel microorganism may be used for the preparation of a variety of carrier materials, such as e.g. milk, yogurt, curd, fermented milks, milk based fermented products, fermented cereal based products, milk based powders, infant formulae and may be included in the support in an amount of from about 10⁵ cfu/g to about 10¹¹ cfu/g. For the purpose of the present invention the abbreviation cfu shall designate a “colony forming unit” that is defined as number of bacterial cells as revealed by microbiological counts on agar plates.

[0077] The present invention also provides a food or a pharmaceutical composition containing at least the Bifidobacterium NCC 2705 and/or containing a supernatant, in which the microorganisms have been grown or an active fraction/metabolite thereof, respectively.

[0078] For preparing a food composition according to the present invention at least one of the Bifidobacteria of the present invention is incorporated in a suitable support, in an amount of from about 10⁵ cfu/g to about 10¹² cfu/g, preferably from about 10⁶ cfu/g to about 10¹⁰ cfu/g, more preferably from about 10⁷ cfu/g to about 10⁹ cfu/g.

[0079] In case of a pharmaceutical preparation the product may be prepared in form of tablets, liquid bacterial suspensions, dried oral supplements, wet oral supplements, dry tube feeding or a wet tube feeding with the amount of the Bifidobacterium/Bifidobacteria to be incorporated therein being in the range of up to about 10¹² cfu/g, preferably from about 10⁷ cfu/g to about 10¹¹ cfu 1 g, more preferably from about 10⁷ cfu/g to about 10¹⁰ cfu/g.

[0080] The activity of the novel microorganism in the individual's intestine is of course dose dependent. That is, the more the novel microorganism or an active component thereof is incorporated by means of ingesting the above food material or the pharmaceutical composition the higher the protective and/or curing activity. Since the novel microorganism is not detrimental to mankind and animals and has eventually been isolated from baby feces a high amount thereof may be incorporated so that essentially a high proportion of the individual's intestine will be colonized by the novel microorganisms.

[0081] Yet, according to another preferred embodiment the supernatant of a culture of the Bifidobacterium of the present invention, or an active fraction thereof, may be used for preparing the carrier. The supernatant may be used as such or may be dried under conditions that do not destroy the metabolic compounds secreted by the microrganisms into the liquid medium, such as e.g. freeze drying, and may be included in the carrier. In order to minimize the number of unknown compounds in the supernatant the Bifidobacteria will preferably be grown in a defined media, the composition of which is known and does not negatively affect the host incorporating it. Further, the skilled person will, based on his general knowledge optionally deplete the supernatant from unwanted products, such as e.g. by means of chromatography.

[0082] The present inventors have investigated baby feces and isolated a variety of different bacterial strains therefrom. These strains were subsequently examined for their capability to prevent prevent colonization and/or invasion of epithelial cells with bacteria that are known to cause diarrhea, such as E. coli, Sigella, Kiebsiella, Yersinia, Pseudomonas aeruginosa Listeria, Streptococcus, Staphilococcus, Clostridium difficile, H. pyori and also Candida albicans.

[0083] Several bacterial genera comprising Bifidobacterium, Lactococcus and Streptococcus were screened for their diarrhea inhibitory properties. The tests for the inhibitory property were performed with pathogenic microorganisms, such as E. coli, Klebsiella, Yersinia, Pseudomonas aeruginosa, H. pyori, and Salmonella typhimurium as representatives for pathogenic micro-organisms causing diarrhea in affected individuals.

[0084] The various bacteria were grown in a suitable medium, such as MRS, Hugo-Jago or M17 medium at temperatures of from about 30 to 40° C. corresponding to their optimal growth temperature. After reaching stationary growth the bacteria were collected by centrifugation and resuspended in physiological NaCl solution. Between the different tests the bacterial cells were stored frozen (−20° C.).

[0085] For assessing anti-bacterial properties the following approaches were chosen.

[0086] According to one protocol the cultured Bifidobacterium of the present invention was examined for its capability to decrease the viability of the different pathogenic micro-organisms. To this end, a culture of pathogenic bacteria was contacted with a concentrated supernatant of a Bifidobacterium culture and the growth potential of the pathogenic bacteria was assessed.

[0087] According to a second protocol the adhesion capability of the Bifidobacteria of the present invention to T₈₄ cells, a cell culture model for the intestine, was determined by culturing the Bifidobacterium with T₈₄ cells and the rate of adhesion was assessed.

[0088] According to another protocol the potential of the Bifidobacterium of the present invention to prevent infection of intestinal cells by Salmonella, using the cell line Caco-2 as a model for the intestine, was determined. In this respect, the supernatant of a cell culture of the Bifidobacteria of the present invention was added together with the pathogenic microorganism to the intestinal cells and the rate of adhesion, or invasion, respectively, was assessed.

[0089] Thus, it could be shown that the cultured Bifidobacterium and the supernatant proofed to be extremely effective in preventing both adhesion to and invasion into the intestinal cells indicating that one or more metabolic compounds secreted by the microorganism is/are likely to be responsible for the anti-diarrhea activity.

[0090] According to yet another protocol it was further assessed, whether NCC2705 would be capable to prevent invasion of epithelial cells by rotaviruses. Two different protocols were applied. According to one protocol the various bacterial strains were examined for their direct interaction with the rotavirus strain while in the second protocol the bacteria were screened for those strains that interact with cellular rotavirus receptors.

[0091] The first protocol involved contacting the respective bacterial suspension each with a different rotavirus strain and incubating in suitable media. Subsequently, the virus-bacteria mixture was applied to a monolayer of cells of the human undifferentiated colon adenoma cells HT-29 (intestinal epithelial cell line) and incubation was continued. Virus replication was then assayed.

[0092] The second protocol involved incubating the respective bacterial suspension first together with a monolayer of cells of the human undifferentiated colon adenoma cells HT-29 and adding the virus subsequently. After continued incubation virus replication was assayed.

[0093] Rotavirus replication was assessed by histo-immunological staining of rotavirus proteins in infected cells. A rotavirus inhibitory effect was attributed to a given bacterium when the number of infected cells was reduced by 90% in the cell culture inoculated with rotavirus plus the indicated bacteria in comparison with cells inoculated only with rotavirus.

[0094] The present invention will now be described by way of examples without limiting the same thereto.

[0095] Media and Solutions:

[0096] MRS (Difco)

[0097] Hugo-Jago (tryptone 30 g/l (Difco), yeast extract 10 g/l (Difco), lactose 5 g/l (Difco), KH₂PO₄ 6 g/l, beef extract 2 g/l (Difco), agar 2 g/l (Difco))

[0098] M17 (Difco)

[0099] Eugon Tomato Agar (Canned tomato juice 400 ml, Eugon agar BBL 45.5 g, Maltose Difco 10 g,

[0100] Hemin Sigma 5 mg, Agar Difco 5 g, distilled water 600 ml)

[0101] DMEM (Dulbecco's modified Eagle medium)

[0102] CFA (according to Ghosh et al. Journal of Clinical Microbiology, 1993 31 2163-6) Müller Hinton agar (Oxoid)

[0103] LB (Luria Bertami, Maniatis, A Laboratory Handbook, Cold Spring Harbor, 1992) C¹⁴-acetate (53.4 Ci/mMol, Amersham International PLC)

[0104] PBS (NaCl 8 g/l, KCl 0.2 g/l, Na₂HPO₄ 1.15 g/l, KH₂PO₄ 0.2 g/l))

[0105] Trypsin-EDTA solution (Seromed)

[0106] FCS Fetal calf serum (Gibco)

[0107] E. coli DAEC C 1845 was obtained from Washington University, Seattle and E. coli JPN15 was obtained from the Center for Vaccine Development of the University of Maryland, USA). The Salmonella typhimurium strain SL1344 was obtained from the department of Microbiology, Stanford University, CA, USA. This strain acts as a pathogen on mice and is resistant to Streptomycin. It adheres to Caco-2 colon cells (Finlay and Falkow, 1990). The Klebsiella was obtained from stock clinical isolates from the microbiological laboratory of the Faculté de Pharmacie Paris XI, Châtenay-Malabry, France. The Yersinia was obtained from INSERM Unit 411, Hôpital Necker, Paris, France. The Pseudomonas aeruginosa was obtained from stock clinical isolates from the microbiological laboratory of the Faculté de Pharmacie Paris XI, Châtenay-Malabry, France.

[0108] The H. pylori was obtained from Institute of Microbiology, Lausanne University, Lausanne, Switzerland.

[0109] Human rotavirus Wa (G1 serotype) and simian rotavirus SA-1 (G3 serotype) were obtained from P.A. Offit, Children's Hospital of Philadelphia, U.S.A. The DS-1\tilde{x}RRV reassortant virus was obtained from A. Kapikian, NIH Bethesda, U.S.A. The serotype 4 human rotavirus Hochi was obtained from P. Bachmann, University of Munich, Germany.

### EXAMPLE 1

[0110] Isolation of Bifidobacteria

[0111] Fresh feces were harvested from diapers of 16 healthy babies 15 to 27 days old. 1 g of fresh feces was placed under anaerobic conditions for transportation to the laboratory and microbiological analyses were run within 2 hours from sampling by serial dilutions in Ringer solution and plating on selective media. Eugon Tomato Agar (Canned tomato juice 400 ml, Eugon agar BBL 45.5 g, Maltose Difco 10 g, Hemin Sigma 5 mg, Agar Difco 5 g, distilled water 600 ml) incubated anaerobically at 37° C. for 48 hours was used to isolate bifidobacteria. Colonies were randomly picked up and purified. Physiological and genetic characterisation was performed on the isolates.

### EXAMPLE 2

[0112] Cultivating Cell Lines

[0113] Caco-2 Cells:

[0114] For the inhibition assays the cell line Caco-2 was utilized as a model of mature enterocytes of the small intestine. This cell line presents characteristic of intestinal cells such as e.g. polarization, expression of intestinal enzymes, production of particular structural polypeptides etc. The cells were grown on different supports, namely on plastic dishes (25 cm², Corning) for growth and propagation, on defatted and sterilized 6 well glass plates (22×22 mm, Corning) for the adhesion and the inhibition tests. After the second day in culture the medium (DMEM) was changed on a daily basis. Before use the medium was supplemented with 100 U/ml penicilline/streptomycine, 1 μg/ml amphoterine, 20% FCS inactivated at 56° C. for 30 min and 1% of a solution containing non-essential amino acids (10 mM) (Eurobio, Paris, France). Culturing was performed at 37° C. in an atmosphere comprising 90% air and 10% CO₂. The cells were splitted every six days. The cells were detached from the walls of the well by treatment in PBS with 0.015% trypsine and 3 mM EDTA at pH 7.2. For neutralizing the effect of trypsine an equal volume of the culture medium containing FCS was added to the cell suspension obtained, the mixture was centrifuged (10 min at 1000 rpm) and the pellet was again dissolved in culture medium. Living cells (not dyed with trypane blue) were counted. About 3.5×10⁵ living cells were transferred to a new culture bottle and about 1.4×10⁵ cells per well and cultivated until a confluent monolayer was obtained.

[0115] T₈₄ Cells:

[0116] For the adhesion assays the cell line T₈₄ was utilized as a model of colon cells from the intestine. This cell line presents characteristics of intestinal cells such as e.g. polarisation, expression of intestinal enzymes, production of particular structural polypeptides etc. T₈₄ cells were obtained from University of California, San Diego, Calif. Cells were grown in DMEM (50%) and Ham's F12 (50%) supplemented with 2 mM glutamine, 50 mM HEPES, 1% non-essential amino acids and 10% inactivated (30 min, 56° C.) fetal calf serum Boechringer, Mannheim, Germany) at 37° C. in a 10% CO₂/90% air atmosphere. Cells were seeded at a concentration of 10⁶ cells per cm². Cells were used for adherence assays at late post-confluence, i.e., after 10 days.

[0117] All strains except Bifidobacteria were kept at −80° C. in their culture medium containing 15% glycerol. As the number of transfers into new media has an influence on the adhesion factors, the Salmonella strain was only transferred twice within a period of 24 hours, the first transfer taking place when the strain was frozen. All cultures were raised aerobically.

[0118] Bifidobacteria

[0119] The bacterial strain (Bifidobacterium longum CNCM I-2618 (NCC2705) was stored at −20° C. in MRS medium containing 15% glycerol. The strain was grown under anaerobic conditions in MRS and transferred twice to new media at intervals of 24 hours before use in the inhibition assays. For the assay a concentration of 2×10⁹ cfu/ml was utilized. The supernatant was collected by centrifugation for 1 hour at 20.000 rpm and the supernatant obtained was subsequently checked for the presence of bacteria. The strains of Bifidobacterium were cultivated anaerobically in MRS during 18 hours at 37° C. The cultures were then centrifuged (20 min. at 4° C.), the supernatant was collected, lyophilized, returned to the solution and then concentrated ten times (10×). The pH of the supernatant was finally adjusted to 4.5.

[0120] E. coli C 1845:

[0121] The first passage after thawing was effected on a CFA—Müller Hinton agar, which is suitable to effect expression of adhesion factors by the bacterium. Before each experiment the bacterial cells were incubated at 37° C. with a transfer to a new medium being effected twice after 24 hours each.

[0122] Klebsiella:

[0123] Bacteria were grown overnight for 18 hrs at 37° C. in Luria broth.

[0124] Yersinia:

[0125] Bacteria were grown overnight for 18 hrs at 37° C. in Luria broth.

[0126] Pseudomonas aeruginosa:

[0127] Bacteria were grown overnight for 18 hrs at 37° C. in Luria broth.

[0128] H. pylori:

[0129] Bacteria were grown on Brain-Heart Infusion (BHI)-agar plates containing 0.25% yeast extract (Difco Laboratories, Detroit, Mich.), 10% horse serum and 0.4% Campylobacter selective complement (Skirrow supplement, SR 69; Oxoid Ltd, Basingstoke, England).

### EXAMPLE 4

[0130] The Caco-2 and T₈₄ monolayers, prepared on glass coverslips which were placed in six-well Corning tissue culture plates (Corning Glass Works, Corning, N.Y.), were washed twice with phosphate-buffered saline (PBS). Bifidobacteria (1 ml, 4×10⁸ bacteria/ml in spent culture supernatant, treated-supernatant or fresh MRS broth) were added to 1 ml of the cell line culture medium. This suspension (2 ml) was added to each well of the tissue culture plate and the plate incubated at 37° C. in 10% CO₂/90% air. After 1 hour of incubation, the monolayers were washed five times with sterile PBS, fixed with methanol, stained with Gram stain, and examined microscopically. Each adherence assay was conducted in duplicate over three successive passages of intestinal cells. For each monolayer on a glass coverslip, the number of adherent bacteria was evaluated in 20 random microscopic areas. Adhesion was evaluated by two different technicians to eliminate bias.

[0131] The results are shown in FIG. 1 from which it becomes obvious that NCC2705 is capable to adhere to intestinal cells as compared to to the known cell line GG (WO 97/00078), La1 (EP 0 577 903) or another Bifido strain (BL28/Cal).

### EXAMPLE 5

[0132] As candidates for pathogenic bacteria E. coli, Klebsiella, Yersinia, Pseudomonas aeruginosa and H. pyori were used.

[0133] Based on a culture of NCC2705 kept in MRS medium for 18 hours, an exponentially growing culture was produced (3 hours at 37° C.). 2 ml of this solution were removed and centrifuged for 5 min. at 5500 g, +4° C. After collection of the supernatant the cell pellet was washed in sterile PBS. After centrifuging, the pellet was collected and 2 ml of sterile PBS were added. The bacteria were counted and the suspension was adapted in such a way that between 1 and 5×10⁶ bacteria/ml were produced.

[0134] The assessment of the antimicrobial effect exerted by the Bifidobacteria of the present invention was carried out according to the Lehrer method described in Lehrer et al., J. Imunol. Methods 137 (1991), 167-173, which document is incorporated here by way of reference. The results thereof are shown in FIGS. 2 and 3.

[0135] From the above results it may be seen that the Bifidobacterium of the present invention may effectively inhibit growth of the various pathogenic bacteria.

### EXAMPLE 6

[0136] Inhibition Assay for Salmonella

[0137] Salmonella are bacteria that invade epithelial cells and multiply therein. For determining the inhibitory activity of the Bifidobacteria of the present invention towards Salmonella typhimurium the strain SL1344 and following procedure was used.

[0138] The pathogenic cells were cultivated in LB-medium. After the second passage to new medium the bacterial strains were marked with radioisotopes using C¹⁴-acetate at 10 μCi/ml in LB-medium. Incubation of the strains in this medium was performed for 18 hours at 37° C.

[0139] The bacterial suspension was subsequently subjected to centrifugation (1041 rpm, 15 min) so as to eliminate the remaining C¹⁴-acetate from the supernatant The pellet was suspended and washed in PBS and the cells were suspended at a concentration of about 10⁸ cells/ml in 1% sterile mannose. Mannose is known to inhibit non specific adhesion. The bacterial solution was then adjusted to 2×10⁸ cells/ml.

[0140] The pathogen (1 ml; 2×10⁸ cells) and an aliquot of a supernatant (1 ml) of a Bifidobacterium culture are pre-incubated for 2 hours at 37° C. The suspension is subsequently centrifuged, the resulting supernatant is removed and the pellet is again suspended in 0.5 ml PBS. This pathogen solution (0.5 ml) is then brought in contact with human intestine cells in culture. The culture was washed with sterile PBS twice and 0.5 ml adhesion medium (DMEM) was added. The cells are then incubated for 1 hour at 37° C. under 10% CO₂.

[0141] After incubation the number of bacteria in the incubation medium and on/in the intestinal cells are counted. In order to determine the amount of cells adhering on or having invaded into the intestinal cells the following approaches have been chosen.

[0142] For determining the number of adhering bacteria the medium was decanted and the cells were washed once with culture medium and once with sterile PBS. Subsequently, 1 ml of sterile H₂O was added per compartment, to lyse the cells and to form a cell solution which was incubated for 1-2 hours at 37° C., after which successive dilutions were carried out. La order to count the number of adhering and invasive bacteria, the cell solution was centrifuged to remove cell debris and the radioactivity was measured.

[0143] According to another protocol 10 aliquots were each put on TSA medium. The media were then incubated for 18-24 hours at 37° C.

[0144] For determining the amount of invaded bacteria the Caco-2 cells were washed with PBS so as to eliminate all non-adhering cells. Subsequently, a medium containing gentamycin (20 μg/ml) was added and incubation was continued for 1 hour at 37° C. Gentamycin is an antibiotic not penetrating intestinal cells so that all extracellular microorganisms were filled, while bacteria having already invaded intestinal cells will survive. The cells were then incubated for another hour at 37° C. and were then washed twice with PBS. The cells were lysed by addition of and incubation in sterile distilled water for for 1-2 hours at 37° C. After removing the cell debris radioactivity was determined. According to another protocol successive dilutions were carried out, which were put on TSA medium. Incubation: 18-24 hours at 37° C.

[0145] It may be seen that cultured cells and the culture supernatant were extremely effective in preventing adhesion of and invasion into intestinal cells by Salnonella

### EXAMPLE 7

[0146] Infection of Mice by the Strain S. typhimurium C5

[0147] Adult, 7-8 weeks old, axenic, female mice (C3H/He/oujco conventional, Iffa Credo, France), raised under sterile conditions, were orally infected with a fixed concentration of S. typhimurium (0.2 ml, 10⁸⁻ cfu/mouse). Some mice were rendered monoxenic by the implantation of a range of Bifidobacteria strains. With some mice, the Bifidobacteria in segments of the intestine were counted after its removal and mincing of the organs in PBS. With other mice, the protection against infection was assessed in such a way that they were continuously kept in a sterile environment and the days of survival were compared to the control group.

[0148] The results are shown in FIG. 4. As may be derived therefrom in the control group nearly all mice died after a time period of about 10 days. In contrast thereto, all mice treated with NCC2705 were alive after 10 days with only 20% dying from the detrimental effect exerted by Salmonella after a period of 30 days.

### EXAMPLE 8

[0149] 1^{st} Protocol:

[0150] 30 μl of the respective bacterial suspension (containing on average 3×10⁶ bacteria) were mixed with 70 μl M199 medium supplemented with 10% tryptose phosphate broth (Flow) and 5% trypsin-EDTA solution (Seromed) to which were added 100 μl of virus in supplemented M199 medium. The virus-bacteria mixture thus obtained was incubated for 1 hour at 4° C. and for 1 hour at 37° C. Separately, cells of the human undifferentiated colon adenoma cells HT-29 growing as a confluent monolayer in 96-well microtiter plates (in M199 medium supplemented with 10% tryptose phosphate broth (Flow) and 5% trypsin-EDTA solution (Seromed) 1:4 diluted with PBS) were washed three times with phosphate-buffered saline (PBS; pH 7.2). The virus-bacteria mixture processed as indicated above was transferred to the cells and the microtiter plates were incubated for 18 h in a CO₂ incubator (Heraeus). Virus replication was assayed as described below.

[0151] 2^{nd} Protocol:

[0152] 30 μl of the bacterial suspension (supra) were mixed with 70 μl M199 medium supplemented with 10% tryptose phosphate broth Flow) and 5% trypsin-EDTA solution (Seromed) and applied directly on HT-29 cells grown and pretreated as described in the 1^{st} protocol in the microtiter plates. After one hour incubation at 37° C. 100 μl of virus in supplemented M199 medium were added to the cells in the microtiter plates. The incubation was continued for 18 h in a CO₂ incubator (Heraeus). Virus replication was assayed as described below.

[0153] The rotavirus replication was assessed by histo-immunological staining of rotavirus proteins in infected cells as described hereafter.

[0154] One day after infection, the cell culture medium was removed from the microtiter plates and the cells were fixed with absolute ethanol for 10 min. Ethanol was discarded, and the plates were washed three times in PBS buffer. Then 50 μl of an anti-rotavirus serum (mainly directed against VP6 protein), produced in rabbits (obtained from the ISREC University of Lausanne) and diluted 1:2000 in PBS was added to each well and incubated for 1 h at 37° C. with a cover slip to prevent desiccation of the wells. The anti-serum was discarded afterwards and the plates were washed three times with PBS. Then 50 μl of anti-rabbit immunoglobulin G (IgG) antiserum produced in goats and coupled to peroxidase (GAR-IgG-PO; Nordic) were added at a dilution of 1:500 in PBS to each well and the plates were incubated for 1 hour at 37° C. The serum was discarded and the plates were again washed three times with PBS. Then 100 μl of the following substrate mixture was added to each well: 10 ml of 0.05 M Tris-hydrochloride (pH 7.8), 1 ml of H₂O₂ (30% suprapur, diluted 1:600 in H₂O; Merck) and 200 μl of 3-amino-9-ethylcarbazole (0.1 g/10 ml of ethanol stored in 200 μl aliquots at −80° C.; A-5754; Sigma). The plates were incubated for at least 30 min at room temperature. The substrate was discarded and the wells were filled with 200 μl of H₂O to stop the reaction. Infected cell foci were counted with an inverted microscope (Diavert; Leitz).

[0155] Only very few bacterial strains interacted with rotaviruses. Merely 4 out of the 260 bacterial cells primarily selected inhibited rotavirus replication in at least one protocol. Bifidobacterium adolescentis CNCM 1-2618 (NCC2705) showed an extremely high activity against Serotype 1 Rotavirus, Serotype 3 rotavirus SA-11 and Serotype 4 rotavirus Hochi.

[0156] NCC2705 is gram positive and catalase negative, it does not produce CO₂ during fermentation and produces just L (+) lactic acid according to methods disclosed in the “Genera of lactic acid bacteria”, Ed. B. J. B. Wood and W. H. Holzapfel, Blackie A&P.

[0157] These results show the extreme superior properties of the Bifidobacterium of the present invention.

1. A Bifidobacterium longum strain characterized by its genomic and plasmid sequences identified by SEQ ID. NO. 1 and SEQ ID. NO. 2.

2. A polynucleotide having a nucleotide sequence as identified by
(a) the nucleotide sequence of SEQ. ID. NO. 1 or parts thereof;
(b) a nucleotide sequence exhibiting at least 90% identity with the sequence of SEQ. ID. NO. 1.

3. A polynucleotide having a nucleotide sequence selected from the group:
(a) a nucleotide sequence as identified by SEQ ID. NO. 2 or parts thereof;
(b) a nucleotide sequence exhibiting at least 90% identity with SEQ. ID. NO. 2.

4. A method for producing a polypeptide of Bifidobacterium longum, comprising:
(a) selecting a nucleotide sequence exhibiting an open reading frame contained in the polynucleotide sequence according to claim 2 or 3;
(b) inserting the nucleotide in a vector or a chromosome of a host cell;
(c) transforming a host cell with the vector of step (b);
(d) culturing the host cell under conditions suitable to produce the polypeptide encoded by the polynucleotide; and optionally
(e) recovering the polypeptide.

5. The method according to claim 4, wherein the polypeptide is produced as a fusion polypeptide.

6. A method for raising antibodies to Bifidobacterial proteins, which comprises,
(a) producing a Bifidobacterial polypeptide according to a method of claims 4 or 5;
(b) immunizing animals with the polypeptide obtained; and
(c) collecting antibodies produced by the animal against the Bifidobacterial proteins.

7. A method for the detection, identification and/or selection of a Bifidobacterial strain, preferably Bifidobacterium longum in a biological sample, comprising:
(a) contacting the sample with a nucleotide sequence derived from a polynucleotide sequence according to any of the claims 2 or 3 in the presence of a polymerase enzyme and nucleotides under conditions which permit extension of the nucleotide; and
(b) detecting the presence of extension products in the sample in which the detection of primer extension products indicates the presence of a Bifidobacterial strain in the sample.

8. A method for the detection, identification and/or selection of a Bifidobacterial strain, preferably Bifidobacterium longum in a biological sample, comprising:
(a) contacting the sample with a nucleotide sequence derived from a polynucleotide sequence according to any of the claims 2 or 3 under conditions which permit hybridization of complementary base pairs; and
(b) detecting the presence of hybridization complexes in the sample in which the detection of hybridization complexes indicates the presence of a Bifidobacterial strain in the sample.

9. A method for the detection, identification and/or selection of a Bifidobacterial strain, preferably Bifidobacterium longum in a biological sample, comprising:
(a) contacting the sample with an antibody produced according to the method of claim 6 under conditions suitable for the formation of immune complexes; and
(b) detecting the presence of immune complexes in the sample, in which the detection of immune complexes indicates the presence of a Bifidobacterial strain in the sample.

10. A method for the detection, identification and/or selection of antibodies directed to Bifidobacterial polypeptides in a biological sample, comprising:
(a) contacting the sample with a polypeptide produced according to claim 4 or 5 under conditions suitable for the formation of immune complexes; and
(b) detecting the presence of immune complexes in the sample, in which the detection of immune complexes indicates the presence of Bifidobacterial polypeptides in the sample.

11. Use of a polynucleotide according to claim 2 or 3 or a part thereof for elucidating interactions between a host and bacteria.

12. The use according to claim 11, wherein the interaction is based on probiotic properties of bacterial strains, preferably on anti-pathogenic properties and/or anti-viral properties.

13. A DNA array/chip containing an array of polynucleotides comprising at least a polynucleotide according to any of the claims 2 or 3 or parts thereof.

14. A protein array/chip containing an array of polypeptides comprising at least one of the polypeptides produced according to the method of claims 4 or 5.

15. An antibody chip containing an array of antibodies comprising at least one of the antibodies produced according to the method of claim 6.

16. A screening assay, comprising:
(a) contacting a test compound with a polynucleotide according to any of the claims 2 to 3 or with a part thereof; and
(b) detecting whether binding occurs.

17. A screening assay, comprising:
(a) contacting a test compound with a polypeptide produced according to a method of claim 4 or 5; and
(b) detecting whether binding occurs.

18. A screening assay, comprising:
(a) contacting a test compound with an antibody produced according to a method of claim 6; and
(b) detecting whether binding occurs.

19. A kit comprising a polynucleotide according to any of the claims 2 or 3 or parts thereof.

20. The kit according to claim 19, wherein the polynucleotide is a primer or a probe and wherein the kit optionally contains a polymerase and deoxynucleotide triphosphates.

21. A kit comprising containing an antibody produced according to the method of claim 6.

22. A computer readable medium having recorded thereon a nucleic acid sequence according to any of the claims 2 or 3.

23. A computer readable medium having recorded thereon a polypeptide sequence derived from the nucleotide sequence according to any of the claims 2 or 3.

24. The computer readable medium according to any of the claims 22 or 23, wherein said medium is selected from the group consisting of:
(a) a floppy disc;
(b) a hard disc;
(c) random access memory (RAM);
(d) read only memory (ROM); and
(e) CD-ROM.

25. A computer-based system for identifying fragments of the Bifidobacterium longum genome comprising the following elements:
(a) a data storage means comprising a nucleic acid sequence according to any of the claims 2 or 3;
(b) search means for comparing a target sequence to the nucleotide sequence of the data storage means of step (a) to identify homologous sequence (s); and
(c) retrieval means for obtaining said homologous sequence (s) of step (b).

26. Use of a Bifidobacterium according to claim 1, or a micro-organism, containing a polynucleotide sequence according to any of the claims 2 or 3, or a culture supernatant thereof, or a metabolite thereof for the preparation of a carrier.

27. The use according to claim 26, wherein the Bifidobacterium is contained in the carrier in an amount of from about 10⁵ cfu/g to about 10¹² cfu/g carrier material.

28. The use according to any of the claims 26 and 27, wherein the carrier is for the prevention and/or treatment of gut disorders or gut discomforts, preferably IBD (intestinal bowel disease), Crohn's-disease or diarrhoea.

29. The use according to claim 28, wherein the gut disorders or gut discomfort is brought about by pathogenic bacteria and/or rotaviruses.

30. The use according to any of the claims 26 to 29, wherein the carrier is a food composition selected from milk, yoghurt, curd, cheese, fermented milks, milk based fermented products, ice-creams, fermented cereal based products, milk based powders, infant formulae, pet food or a pharmaceutical composition selected from tablets, liquid bacterial suspensions, dried oral supplement, wet oral supplement, dry tube feeding or wet tube-feeding.

The application's sequence listing, which the Patent Office published only in electronic form, follows.

SEQUENCE LISTING (2 sequences)

SEQ ID NO: 1 - DNA, 2256646 bp, Bifidobacterium longum
gtggtgtggtatcagaatgagaccgataaggccaccgctgaggatgtggcgaccacgcttggcatttcggctgtggagcaggtgcaaggactcgccgttcccattacggtggtgttgctcaactagcgttgttgatgcgcccctgatatcggcgagaaatacatcgaaaactgtgagcgttctcacgtctatggaataattcgtaccgaaaatgtgccactgcggttgagattgttccctcgtcactgtacaatcgtcatctagtcgcgaggtagggggagcgcgatgcggttctttctacgttccctataggttttgtgtcgcgacgcccaagggaacaaaggaaagaccagatatggcacaaggtaccgtgaagttcttccttgccaagaaggggttcgggttcatccagccggacgatggcggcgaggacgttttcgtgcactacgcggaaatcaaggacgacggcagcaccaataagttcaaaatgctgtacgaaggcgatcgcgtggagtatacgcccgcttcgtccggcaaaggcacgcaggcaaaggatgttgtcaagctgtcttcgggtgaagcccgctccgagtgagcaacacgcacgcaaggatgtgcattgaaggccctgaccgtttcgacggttggggctttttcatgcccaaagcgcaatcgccgccgatggtgttggcactcggcgggcgcgagtgctaatgtctgggttagcactcggaggtcgagagtgataatcggcagctgacggctggtcgtcacgactcgacgcttgcgagtgataaccggtatacctagccatttggaggaatacgcaaccatggcaaagatcatctcttatgatgaggaagcccgtcagggcatgctggagggccttgacaagctcgccaacaccgtcaaggtcactctgggcccgaagggccgcaacgtcgtgctcgacaagacctacggcgctccgaccatcaccaacgatggcgtgtccatcgccaaggaaatcgaccttgaagacccgtacgagcgcatcggcgccgagctggtcaaggaagtcgccaagaagaccgacgacgtcgccggtgacggcaccaccactgcaaccgtgcttgctcagtccctggttcacgagggtctgaagaacgtggtcgccggctccaacccgatcgccctgcgtcgcggcatcgagaaggccaccgaggtcatcgtcaaggaactcgtcgctgccgccaaggacgtcgagaccaaggaccagatcgctgctaccgccaccatctccgccgctgaccctgaggtcggcgagaagatcgctgaggctctggacaaggtcggccaggacggcgttgtgaccgttgaagacaacaaccgcttcggcctggacctcgacttcaccgagggcatgcgttttgacaagggctacatcgccccgtacttcgtcaccaacgctgacgaccagaccgcagtgctcgaagatccgtacattctgctgacctccggcaaggtctcatcccagcaggacatcgtgcacgtggccgagctggtcatgaagaccggcaagccgctgctgatcatcgctgaggacgtcgacggcgaagcactgccgaccttgatcctgaacaacatccgtggcaccttcaagtcctgcgccgtcaaggccccgggctttggcgaccgtcgcaaggccatgctgcaggatatggccatcctgaccggtgctcaggttgtctccgacgaactgggcctgaagctcgagtccgtcgacacctccgtgctcggccacgccaagaaggtcatcgtctccaaggacgagaccaccatcgttcagggcgctggctccaaggaagacatcgacgctcgcgtggcccagatccgcgctgagatcgagaacaccgactccgattacgaccgtgagaagctgcaggagcgtctggccaagctggctggcggcgtggctgtcatcaaggtcggcgctgccaccgaggtcgaggccaaggagcgcaagcaccgcatcgaagatgccgtgcgtaacgccaaggccgccatcgaggaaggcctgctgcctggcggtggcgtggccctcgttcaggctgctgccaaggccgagaagaccgaggccgtcacctccctgaccggcgaagaggctaccggtgccgccatcgtgttccgcgccatcgaggccccgatcaagcagatcgccgagaacgccggcgtgtccggtgacgtggtcatcaacaccgtccgctccctgcctgatggcgaaggcttcaacgccgccaccgacacctacgaagacctgctggccgccggtgtgaccgacccggtcaaggtgacccgctccgctctgcagaacgccgcctccatcgctggtctgttcctgaccaccgaggccgtcgttgccaacaagccggagccgaagtctgctgccccggccgccggtgccgacatgggctactgatccgcaaacgatcgctagctgattgagctgaaaggggactccttcgggagtcccttttttgtattctggctcccctctttgaggggagccaagaaactagctggcaaacaggcgcgaagcttggatttcggcgtcagcgtacacggtggaggcttgcgtcagcgagcgttggatggactcgagtgaggcctccatctgctgttgggccgcacgccactgttcggctaccgcggtgaactgggtggccgccgaacctcgccatgcgtcctgcaaggcattgagattggtgtacatgccgcccacggcctgcctgatttgcgagatcgaagtggccactgcggccgaggatgattggattcgctcggaatctacctgatattggggcatcgttgctccttttctagagggttaatggtatgtatggcggccgattgccaataccggccgttaaggtggaggatatgtcaacaacgaatcgggaagacggaaaaacaactattgtggtcctagcttcggagccgtcctattcggccttcgggaatatggtccgaaaatggcttgtttgcgccatttgcgcccttgctgcagtagcgatgaacgcaatgtggataactgcaaatgcctatggggataactcgagcgacagctctgacagctccagcagcagcaccgacagcggcgtgaccatcaccgagaacatcacggatacggaaaatctcctgggctcccatgcggccgaagtcacggatgccatcgccaaaaccgagaaggaaaccggtgtacacgtgcatctgctgtatctttccagtttcaatagtcaacagaaaccgggagactgggcggcaaccgtgatggagtccatgaatcccaagccgaacacagtgatgcttgccgtggcctcgaatgacggcaacctggtggtcgtcgtgtccaagaactccgataagtggcttctcgataacaaaaccgtcgataagctatccgaagccgcacagcagccgttactggaaaacccgccgagctggtctggcgcggcaacggcaatgatggatcaaatcgtgaaatccaaaaaagcctccacctcatcgtccacggtgatcgtaggcataatcatcatgggtgtggtattggtggcgctggtcatcatcatcgtggtcatggtggtgattcatcggcgcaaggagatcaagaaggattccaaggccgaactccaagatgacattcaggaaacgcccagaagagcgcgacactctaggaagcatgagtaagcctattgaagcatcgattgttgttgtcgacgacgagccgtccatccgagaactgctggtcgcttccctgcacttcgccggattcgaggtaaacaccgccgcttccggttccgaagccattgaggttatcgaaaaagtgcagcctgacctcatcgtgttggacgtcatgctgcctgacatcgatggattcaccgtcacccgtcgcatccgccaggaaggcattaacgcccctgtgctgtttctcaccgctcgtgacgacacccaagacaagatcatgggcctgaccgtcggcggtgacgattacgtcaccaagccgttcagcctcgaggaagtcgtggctcgcatccgcgccattctgcgccgtacccgcgaacaggtggaagacgatccgattattcgcgtcgccgacttggaaatcaacgaggactcccacgacgtgacccgtgcagggcagccggttgacctgagccctaccgaatacaagctgctgcgctacctgatggacaacgagggccgagtactgtccaaggcacagattctcgaccatgtctggcaatacgactggggcggcgacgcagccatcgtcgaatcgtacatctcctacctgcgcaagaaagtcgacggcatcgaggtcgacgacggcgaaggcggcaagcgcaaggtgactccgctgatcgaaaccaagcgcggcatcggatacatgattcgcgaaccgaagaactaatcgcctccatccataacgtatcgcaatctcatgagtatccccgataagcagtcaggcggcgtaccgccgagcagcacgccgaacgccgccccgaacacgaatcccatgcctgcaatgtcgccgttcgccgcccatttccaagagcagcgcgagcgtaagaaaaacatgctgatgcggcatatcgaccgtatctcgttgagcagcaagctggtggcctgcaccatcgccgtgctgctcatcggcgtgtcggtgatttccttctccatccgcgcgttggtgaacaactacatgctgcagaaaaccgacacccagttaagctcgcaaagccaactggtggtcaacaatatcgatctgctgtcaaaaaatgactcatcggggccgaactcgtactttctgcagattcaatacaccgacggaaccaaagacaaagaaggcaatcctctggtcgtgaccccgctgatgccgcagatgcaggacggtatcgtatcggtgccgattctgcctacctatggcgataccaatggcatcacgctcggtcaggcattcactacgcaggcggtggccaagcagatcatcacggtgcagtccgacagtgcggacagccagaacgatccggccaacggaaactccaattcctctgacaccatcaccaaggtactggccaaccccactgccaatgccaaccatgccgccatcgtcacggcgagggcaccatggcgtattctgccggtgaccttccagcaaaacggcaaggaccgtgccgtggtgtacatcggcttgtcgctggccgaccaaatcgacaccgtcaacacactcacccgatactgcattgtggtcggcatcgccgtggtgctgctcggcggctccctgtccacgctgatcatccagcacacgatgacgccgctgaagcgcatcgagaagaccgccgcgaaaattgcagccggcgacctgagccaacgtattccttccgcgccggaaaacaccgaggtcggctctctggccgcctcgctgaattccatgctcacccgaatagaatccagtttccatgagcaggaggagaccaccgacaagatgaaacggttcgtctccgacgccagccatgagctgcgcaccccgttggccgccatccatggctatgcggagctgtataagatgcagcgcgatatgcctggtgccttggagcgtgcggacgagtccatcgaacatatcgaacggtccagccagcgcatgactgttcttgttgaggatctgctgtctttggcccgtctcgatgaggggcgcggcatcgatatgaccggcacggtgaaactctcgtcgctggtcaccgacgccgtcgacgatttgcatgcgctcgacccggaccgtgccgttcgccgcatgcagatttccctcgaaccggcgcgcgatttgaaccatcccgccgaattcagccttgccgaaggcgattggcctgaggtcgtactgcccggtgatgcctctcgactgcgccaggtggtgaccaacatcgtgggcaacatccaccgctacacgcctgccgattcgcccgctgaagccgcgctcggtgtgatgccggccgccatcgatccaagacagctcgcccgcatgcccgccagcgacgcgtcaatgcggcggttcatcgacgctgccgaagtaggtgcctcgatgcagaccggctatcgatatgccgtattgcgtttcgtggaccatggccccggcgtgccgcctgaatcgcgctcgaagattttcgaacgcttctacaccgcggacccatcccgtgcccgcgaaaagggcggtactggtttgggcatggccatcgcgcaatccgtggtcaaagcacatcacggctttatctgcgccaccggcaccgatgggggaggcctgaccttcaccgtggtgctgccgattgagcagatcgccgctcctgagcccaagcagtccaccggcaaaaccaaggacgccaaacagaagacttcttggttcagctctgagcgtaagactcaggcgactcagcccaaagcgtgaggtcaagccctgtgaggtaaactgtaccttcggtttactatttccattgaggattaaggaaggttcgcaatgcccaccggtcgagttcgttggtttgacgcagccaagggttatggcttcatcaccagtgaggaaggcaaggacgtgttcctgccggctcaggccctacccactggcgtcaccacgttgcgcaagggggccaaggtggagtattccgtggtggacggccgtcgtgggccgcaggccatggatgttcgcctgatcgcctccgctcccagcttggtcaaggccacccgcccgaaggcggatgacatggccgccatctgcgaggacctcatcaagatgcttgatgcggccggcaatacgttgcgccgtcaccgttacccatctgctgccgacagcaaaaagctggccacgttgctgcgtgcggtggcggatcaattcgatgtacaggactgatctgatctatgactgataccaccgaaaccatcgtgacaccggaccctcacgccatcgcgcgcgccgtgctgctcgaagtggccgacgagagcgatcaggtgggggatttcgttacctcatatgatcttgaggatcacgtcactgacttccgcttcgccgcgaatatccgtggctacgaaggatggcaatggtcggtgacgctgtatcacgacgaggagatcgactcctggaccgtcaacgaatcctccttgatctccactgaggacgcgttgatgccgcccaagtggattccttggaaggatcgccttgagcccacggatttggctcccaccgattcgatcggtaccgatccggatgacgagcgcatcgaggaaggcgaagtcgaggaatcctcgctgcaggatgtcaacgacgccgtcgagaccttccgactgacccgccgtcacgtgctgacctcgctgggccgcgcgcaggctgccaagcgctggtatgaaggtccgcgaggccccaaagcgttgagcaccaaaaccgccgaaggcaacctgtgctccacctgtggtttcttcgtgccgctcgcgggcgagctcgaccgtatgttcggcgtgtgcgccaacaagtggagtccggatgacggccgcgtggtttccttggaccacggctgcggcgagcattccgaaatcgaacctcccgagccaagccagctgtgggtgcagtccaagcctgctttcgacgatctgcatatcgacgtggtggccaaccgtccgcgcaagcaggagccggctgcccaggacgaggccgaaggcgaaaccgacaagacaggcgagcctgccggtgatgatatcgaagcacagaagactgttgacgggaacgccgtcgatactgagcccgctgaggaggcggcaggcgacgggacctcgcaatcccagtctgccggtgatgagtccgttgcacagaacgtatctgattccgttgtggatgttgatgcagctgattccagcgacgattccaagtctgatgctgacgacgaggccaccgaagaggatatcctcaacaacaccgttgccgatgatgatgaggatgatgagatggacgacgaagaggataacgttcgtccttcagacgatgtgactcctgaactcgaaaccgtcatcgatctcattgagcagctgcgccagaacagggcggacgaggaataaactccgaattccgcgaaaagtagatggtgatggggttgcaggaataaagaattcctccctgcaagcccatcaccgaggcgtgcgttagcactccatgccgattttggtgaatcagtgcaccacggtcaccgtgcattcggcgaagttcacgatctggcgggacaccgatcccaggaagtgcgcgtccagcccggacaggccacgcgagccgaccaccagatggctggcgtaccgcgaggccgcgatcagacctttggatgcgggaatatggaaggcgtttgtgctgaccttgacgccatcgggaatccgggccttggccatcagctcagagagaatctcctcggcgcggcgctgaccgaccttcaccggtgccacggcgttctcatagcccggaataacgcccaaatccttgagctgccagcagaacatcacatgcagcggcgcgtcgtgcagtcgtgcttcttccagtgcgaaatcgaacgcacggcgggaagtctcggaaccatccacaccaaccaccaccgggcggcgagcctcctcaaccaccggctgaggctgcgtgtagtgaacgggcttgtctcccggagtcagggcgttggcaatggcctcggtcacggtctcatcctcgctgccggcgatgcgcaccacggtcaccggcacttcggcggcctcggccagcgaagcggacagggaccccatgaaccagcgggccatacggctcagcgagcggcggccgaccacgatctgctgcgaatcatggccgatctgcagcagggccgaagtaccggaggccttcaccgaggtgagcttcagattcgccggatcgaagtcgatgcctgcagcggccttgtcgacccacacacgcagctcgttggcaatatcgtggcggaccttggcccaggcctcgtcgctgtccggttcggaccccatatcccaggaatgcgtccagccaaacacggcgttgacgctctgaccggttaacgaggcctcctcaagcgcccacttcagcgcggcaaaggattcatcggaaccatccacaccgacaacgatgtcgggcttggttgcagcttcactcatttcgagcctccttgtaatcgactacgggtgaatctagaaccagcatatcgttttcttctcctctcacggcgcaattcgtggaatccgatgaataaacgtcatcgtgaatcggtagagtaagacggaatgtcaattgaggaaggacaagcatgttcgaacggtttaccgaccgtgcacggcgcgtgatcgtgttggcgcaggaagaggcgagggcccttcagcacaactacatcggcaccgaacacctgctgctcggcctgatccgcgaaggtgagggtgtagccgccaaggcactcgcctcgaagggcgtggagctggatgccacccgcaagcaggttgaagaaatgatcggcaagggcaacgcggctccgaacgggcacatcccctttactccgcacgccaagcaggtgttggagttttcgctgcgtgaagccctgcagctgggccacagctacatcggcaccgagcacatcctgctcggcctgattcgcgaaggcgaaggcgtgggcacccaggtgctcatcaagatggacgtcgatctgggcgagttgcgtagcgcgaccatcgatatgattcgcggcaactccggcaccggcaccggtgacggcaagggcgacttggccaacgccggcggcgtgacggacaagcagaacaagtccggttccgccatcctcgatcagttcggccgcaacctgaccgccgaagccgctgaaggcaagctggacccggtcatcggccgtaccaacgagattgagcgcgttatggtcgtgctttcccgccgcaccaagaacaacccggtgctgatcggcgagcccggcgtgggcaagaccgctgtggtcgaaggcttggcccagaagatccaagccggcgacgtgccggaaaccctgaagggcaagcaggtctactcgctggacctcggttccatggtggccggctcccgctaccgtggtgatttcgaggagcgcctgaagaaggtgctgaaggaaatcaagactcgtggcgacatcgtgctgttcatcgacgagattcacaccatcgtgggcgccggctcggctgacggcgcgctgggtgcctccgacatgttgaagccgatgctggcccgtggcgagctccagaccattggtgccaccaccaccgacgagtaccgcaagtacatcgagaaggacgcggctctggaacgccgtttccagccgattcaggtgcacgagccgaccatcgccgagaccatcgagatcctgaagggcctgcgttcccgttacgagaaccaccaccacgtgaccatcaccgatggcgcgctgcagtctgccgcagagctgtccagccggtacatccaggaccgtaacctgcctgacaaggccatcgacctgatcgatgaggccggtgcacgcctgcgcatcaagcgcctgaccgccccgcctgagctcaaggaactcgacgagaagatcgccaagatcgccgccgacaaggacgaggccatcaagggccaggacttcgagaaggccgccgaactgcgcgacaagcaggagaagctggaagccgatcgcaagcagaaggaagactcctggcgcgaaggcgagtccgacgtcaagatggtcgtggacgaggacgtgatcgccgaggtcatcagctccaccaccggtatcccggtgttcaagctgactcaggccgagtccaagaaactgctcaacatggaagccgaactgcacaagcgcatcatcggccaggacgaggcggtttccgccctgtcccgctctatccgccgtactcgcgtgggtctgaaggacccgaagcgcccgtccggttcgttcatcttcgccggccccaccggcgtcggcaagaccgagctggccaagacgctcgccgaattcctgttcgacgatgaggacgcgctgattcgcgtggatatgtccgagttctccgagaagtacgcggcttcgcgactcttcggtgcgcctccgggatacgtcggctacgaggaaggcggcgagctcaccgaaaaggtgcgccgcaagccgttctccgtggtgctgttcgacgagatcgaaaaggctcatccggacatcttcaacacgttgctgcaggtgctcgatgacggccacctgaccgacggtcagggccgcaaggtggactttaagaacaccatcatcatcctgaccaccaacctcggtacgcgagacatcgccaaggccgccaacacgggcttcaacctaggtgccaacaacgagtccagctaccagcgcatgaaggaccaggtcagctccgaattgaagcagcagttccgcccggagttcctgaaccgtctggacgacatcatcgtcttcaagcagctcaccgagccgcaggtgcgccagatcgtggatctggacgtcaagcagctcaacgaccgcctgttcgaccgtcatatgtcgctcgaactcaccgacgccgccaaggacctgctcgcgcagaagggcttcgacccgctgctcggtgcccgtccgctgcgccgcgtgattcagcgcgacatcgaggacgccatctccgagaagatcctgatgggtgatctcgaagacggtcagcgcgtgattgtggatgcggaaggcgagggtatcctcggcgaattcaccttcaagggtgagaagttcgaggagccggccgccgccgataagcccgccgaagacggtgccgacactgatggcgagactccagccgacgtcactccggtcactgaaccggccgaatccgctcccgccgattccggtgacgctccgcaggagtagtccgtttcgatagcgtagctagcgcataccagcaaagctccccttgacaggggagctgtcagcgaagctgactgaggggtagacctgcgcacacatgatgtgcacgtttgtggtctacccttcagttgcctctggcgacagctcccctgtcaaggggagctactgtttgtgtcggattattacagcagggcgagtccggtgtcgatggtctcctcgcgggtaaacagcgtgcggccggcgcgcaccgaacgcaatactgagcagcgctcatacacggcgttgaacacgctattggcgtccagcacaatgaagtttgctggcttgcccgtttccaagccgtacatatcgcgcaggcccaacgtagtggcaccgttgacggtcaggaacttcaacgcatcgtcgatttcttcaaagctcatcatctgtgccaaatgcagcacataatcaagaatgagcatcatattgccattgcccagcgggtaccacgggtcctgcattgaatcctggcccaatgacacattgacacccgcctcagtgagctccttgactcgcgtgatgccacggcgcttggggaaggtatcctgacggccctgcaaatacaggttctcggtgggggcgcaggcgaagttgatatgcgccgccttaagcagcttggtcaggtggaagaagtaggcgttgtccgccgatcccagcgagcaggtgtggctggcggtgaccttcgggccaatgccagccttatatgccagcgccgaaagcagctccacgtaacgggaattcggatcatccgtctcatcgcaatgcacgtcgatgagcttgtcgtatttcgaagccaactcaactaccgtgtgcatggaatgctcgccaaactcacggcactgttcgaaatgggggatgccgcccacgcagtcggcacccatcttgagtccttcctccaccagctcggcacccgattcgccatgcgggccctcgtaggagtacatgccctcctgcgggaagctgacgatctggagagtgaccgtatccttcaattcctccttaagctccagcagcgcctttaacgaggtcaggttcgggtcggtcacatcggcatgggatcgaatgagctgcacgccatgcagcatttctttcttaatgccgattttcgcgcgctgcttgatctcgtcgaccgtcaagtcggacttggtctcactccatcgctggatgccctcaaacaaggttccgctttcattcaccgcaccgggcttgcgggccgtgaatacgtaatcaaggtgcagatgcgtatcgcagaacggtgggcagacaagtttgccgcccagatcgaccacctcaatggccgccggatcaccaccctgagcctcatattgttgcgcgagtccggggccgaatgcggtgaacacaccatccgtgacgagaatgtcctgcaatggcagggtgcttgcagccgtgcttccgggttctccggtggcgatatgtgcgttggtgaacagtgtggtagtcatcgtcgctccttcaactggtgtgttgccgaacggttacgtgaaccgactgcccgcgtaaccaactgaggttattgtcaacagcacgctttgcggtgaggttaaccggaacgaccggtgttccgcgggggaatggacagattgtatgactgtatcgattcgcagtgtgcttcataacacgcagttcaaacgagccgatcctgtggtggaggtcgaaggcaaagacctcgatatgccagtgcgatgggtgttcaccaacgagcgagaggatgtctccagcttcctttcgggcggtgagatgctgattatcgagggcaacgctctgctcgccgccgattggcacggcacgctaggacaatatgtagcaagcctggcacaggctggtgtcgccgctctggtggtcgaactggtggagggtgtggtgcggatgccggacgaactggtgtctgcggccaggctgcatgggttgacgttgattggtttgaaatctcgcgtaccttttgtcgacatctgtcagagtgtcaataccgctatcgtgcacgaacagatgcacttgcaattggaggtggacacaatgtccacttcattacgtgagggattgtcccgtaccggcaatatcgaggctgtggccgaaaccattgcgtcgctgttcggcgaaagcgtcgccattttcgatggtgacggtctgttggccgctcgagcgggtcgtgcgttcgatgccggcaacgaatcgagcgccgtcatcgcccttgaaagtcgctcccggccggtgggagcattggagatcacgcaacgcaccatgacttccgacgccacgatgcgtcgggccatcgccaccatcgtgtctccggtggccgccctttatattgacggcggtgcgcgcatgggcatgatgcatcatctgagtatgggtccggccgacggcgtgcacgtcaatacatttgaggcgcaggaagcgcatgcgatgctcgaagcgctgggttttgccggatcatgcatctatatgccattcgcttttcggttcagatcggtggtggaaggcatcaaccatgtatcgacgatggtcgaacggttcgaagaactgtcgggatgcgccgtctcctgcatgctggaaggtgacttgatggtcggatggtgctccaccaccgattcctcagacggtgcggccgcattcggacgccattgcatggatgcgcttgccgtactggaaggcgacggtatatacgtggtgcatggccgagtggcattggatacggtgacgctggtcgacgggttcgcggtattgcgtgacatcgccaatcatgaaccggcatacgggcgagtcgtaagtaccatgtccgcactcgtcgaccgtttcgtcgcatcctctgatatggacaaggcgatgcgcatgctcgtggtgcagaccatcggattcgaggtcgccgcctccccgctgttgctggacacactgtgcgcctgcttcgacaacctcgacagcaaaaccggcgcgtgcgagcaattgggtatcagacggcaaaccctgtacaaccgactggacaaagtgacacaaatggtcggcgtcgactataacgacaaaccgaactgggtgatgctgctattcgccgccaaactcacgaaatcatggcaagaacagcatggtgaataatacggcagtgccactgggcaacctgtccacttctacgccgaacgggttaatcgacgattcacgtttcagcaaatactcaagggcatagtcgaggctatcgcggcgctggtcgacctgctgcgaaacggattcccacttgaatctcattcagtcacacgaacagcacatccttgaaaggacggtgacatcatgagttccgcaacgattactacatctgcacgactgataaattccaccccgcaaactgaagaacaggccatggtcagaaaagtcgcggtatcttccttcctcggcaacttcatcgagtggttcgactacgcctcctattcgtacttcgccaccactatcgccctggtgttcttcccaaccgacaatcacaccgtcgccatgctgcagaccttcggcgtgttcgcgctatccttcatcctgcgtccaatcggcgcactgttctggggtagctatggagataagaaaggccgtaaagccgcactggcccactcgattatgttcatgtccggtgcgagcttcctgatcggctgcctgccgtcttactcggtgattggcgttggcgcgccgattctgcttctactgctgcgcatggtgcagggcttctccgcctccggtgaatatgccggtgcggccacgttcctcggcgaatatgcgcccacttcaaagcgcggcatctactgctcgctgattccggcttccaccgctatcggtctgctcgccggttctactctggccacgctgatgaccgccaacatgaactctagcgcgatggtcggttggggatggcgtgtgccgttcctgctggccggcccgctcggtctgattgtgctgtacatccgcgccaagctcgctgattcccccgtctaccagtcgatgaacgatgcgcttgagtccaagggcgccgcctccgccgacggtcaaatcgctgccaagagcggcatgttcgccccgctcgccgagttgttccacaaccatctcaaggctctgatcatcagcttcggagcctgcgtgctgaacgcggtcggcttctacaccgtgctcacctacctgccgacctatctgtctgacaccgtcggcatggacgccccccagtccggcaccatcaccaccatctgcctggtcgcctacgtgttcatggtgttcggcatgggccacatctccgacaaattcggccgcaagaaggtgctcatcggcgcttgcgtggcgttcatcgtcctcaccgttcctgccttcctcatcctcaacacctcccagttctggcccgtgctgctggttgagctggcaatgtgcgccaccctgaccgccaacgacggtaccctgtccagctacctgaccgagacgttccccacctccgtgcgcttcaccggattcgcgttcagcttcaatctggccaacgccatcttcggtggtacggcctcgttcatcgccactggcctgattgccctgaccggttcgtccatcgccccggcctggtacatggtgggcgttgcggccatcgccttggtcgcgatgatcctctcccacgaaaacaccgacaaggatctgaatcacatctgatctcctcagctccggctccttccccgagggagccgggcgtattcatcgaccatccaatccaccaccaacctaaaggagtactgcaatgggtagcaaccgccgtatggaccacatgacctggccggaattcaaggaggcgaagactcgtcccgtcatcgtgccgatcggttcgaccgaacagcacggccagcatctgcccatcggcaccgacgcggtactcgccacgcgggtcgccgaagatctggcggaacgcatcgacggcaccgtgctgcccaccctgagctacggatacaagtccaagccgctctccggtggcgggccgctgttcccgggcactatcgacatgaacggcgtgacagtgatcaaccaaatgcacgacgtgctgagcgaactcatcgccgatggcttcaccaagatcgtcgtcatgaacgcgcattttgaaaacgaggcgttcatcgtcgaggccatcgacctggtcacccgcgaaaccgggggagtggccaccatcgtggaaaccaattggtgggacccggttccgcagtcggttatcgacaaggtattcgatggattggtgttccccggctgggcaatggagcatgcggccgtcaccgaaacttcgttgatgctccactatgcgccggaactggtgcacatggaccgtatggtcgaggaagccggtgccacggcgaaatcctatgtccgctaccctgtgcgccaaggtgacgttcccgctcacggcggactcgccaatccggccggctcgagcgccgaacgcggccgtctgattgccgaggcgtgcgtgggtgcggtagctgagatctgtgccgaggaatttggcgagtaatctccccttgctgacgcattcgtagtgactcgggttgcaaaggtctgaccctgatagtacggggtcaggcctttcccatcccaagacgccgctaagaattcacctgagagtcgccttcctaggcatggccattcaatcgacgattctagcgtgactggtgtgagcaggaatatgaagaacaggcggtgggccggcaagcgatcggggatcgcttttggtgcagtagcgcttatccttacggctctggtggttccttatgcttgtgcgggaaccacgggagccgttcctttttccggcgataatccatcttccggcacccgtacggtgaccatcgccgacatcactgattttcacgggcatatcgaacgtggtgcggacaacgccaccgccttcaccgtggccgacagccataatcccggcaatatgattccggtatcgaccggcgatttggtgggaggctccccgtatgagtcggcggtggagaaggaccaacccacgctggatatggccaaagcgtggggattgacgatttcggcgataggcaaccatgagttcgaccgcggtgtcgccgatttcaacaatcgtatcgctgatcccagcaacggcatcgactggctgtgcgccaacgcgtctgccgccaataagtcgcctgacggactgctgagccacgtacgtgactctacgattcgaacggtgaacggcaagcggatcggtttcgtgggcgcccttactgatgcgctcggctcggtggccactccgcagatcactcgtgatgccgatcttgacgaacgggcggtggacgcgatcaatcgtgtggcccgtgaactcaagcgctccggaaaggtggatgcggtggtggccttgctgcatgccgatgcttcagccgccgccgatattgggcgagatgttgatgtggtatacaccggtcacagtcacgcgatcaagcgtggtacaaccgcgggtggcgcgcctatttacgaggcgggcagcttcgggcggaacatggccgtgcaggatttgatcatcaccggtgccgggcgtcgcgccacggtgcgagtggccgacgttgacctcggcaatggcaccagccatacggcggttgacggcgtgctgggcgtggatgggcttaatgcgcatccggcgcaagccgcttggatgtctgccggtgctgaggagaacgatgaggtatcgcgcgcgcagcatatttaccaggcgtcggcaacatatgcgaaccataccggcagcgcggtgattggcaccttggcctccggcgtgaatttcgacaaacaaggttcggacaagcacgggaatacggtcggtgtgctggtggcggacgcgaaccgagagtcaatcatgaagcatgtgtatgccgggaatcgcttgccggtaatcggattttcgaataatggcagtctgcggactccacggcttgatatgaatggcgatggcaaagtcaccgtgcgcgaggtggatagtctcatggccttgcagttcaaggccgcgcatgagacgctcaccgggcgcgatgtgaagagagtgctcgccgagcaatttcgccgtgacgatgggcgactggagcggcgctggctcggcatctcctcgaacgtgacgtatcggtatgccgaatgcggtacggctggtgagagcggcaatgccgatgccggcgttgatactgattccggcgctgataccaacgctgacgctgacgagtgtgctgccgacgaacatgcggcggttcgtatcgcgaacctcgccgttgacggccgaccgattgcggacgatgacctggtgattatcgcgtccaattcatatctgcttcagggcggcgacagttaccccgccttccgtgccggaaccaattacggcgagctggatatgccatacagccagccgttgcatgaatatctggccgcacatcaagggctcacggcagttgttgcagtaccggtagggactcaggcgtaagacaccaattgctgggtgactgaggaactatggggtgaagttatgagtatagggcaggagaaaacggcataaatatgacgaagctcccctcgctgaggggagctgtcgccgtagacgactgaggggagcttgcggtataaccgtaaactcccctcagtcagccttgctgccagctcccctctctgaggggcacctggcgagacccttacttgatggcgttcagccactgctccttagtggccttctcggcttcgagcttggccttcttcttcgggtcggattcggccgcgatcttggcgtcgagctcggcgagctgggcgttgagctgctcctcgaagctggacttgcgggcgtcggcctccggatcggtctgcttccaagcggcatcctcgatggccttgatctgcttgtcaacggcgtcgagacggttctcgatgcggcgcatatcgtcacgcggcacgtaaccgatctgatcccactcttcctgaatcttggccagctcctggcgggccttcttggcctcggcgtcggtcttcaccggcaccagagcctcggccttgaccagcagagcctccttggcagccagattctccttctcggaggagttgatctgatcgcgatcggcctgacgagcgttgaagaaggtgtcggcggcttcgcggaacttggcccacagctcgtcgtcctcgttacggccagcgcggccggccttcttccaacggtccatcagatcgttgaacttgcgggaagtctcaccccaagcggtggaatccttgagctcattggcctcggcgataatcgcttccttggcttccttggcggctgtacgctcgttgtcgcgagcctgagcccacttgcggcgagcctggttgaaggtggtacgggcgacggagaagcgcttccacagcgcctcggcctccggcttgtcgatgcgcacggtggtgcgctggtggttctgccactcgtcgaacaggttacggaacttgtcggcggtggagcgccagttggtgttgtcgcccagagaagcggccagtgcttcagccttctcgacaatggcggtgcgctcggcaacggccttggcctgggcggccttgcgtgcctcggcgatttcggtcttcttggcctcgccggcagccttcagctcctcgtactgggtcttgagtgcggcaagatcgcccacgacggctggctcggaggtttcttcacccaagagcttcacggattcgtcgatttcacgggccttgatgttcggggaagccaggcgggtggccagcagatcgagcttggccttgagatccaggaaacgacgggcgtacagtgccaacgcctcttccttggagacatccgggaactggcctacctcgcgctcggcgtcgccatccttgacgaagacggtgccgttgtcatccacgcggccgaaggcctcggcggccttgacatcagcctcggaataggcggcggtggcggcggccggggcggcagcgcgcggcttggccgccggagtcttcttggcgaaggcggcgggggagggcgcgtgcggtttcggcatggaagcgggggacggagtcggcgccggcgtggccgcgctggcctcgggtgcgggtgtcgttgcctgctcttcgggcgcagcggtgtttacgggttcggtgacagtttcgtcggccatggccagctccttaaagcgtagaatgcataagcgggagcgtctcccatcccgggcgaaccaggaagttttgacgcaaccctcacctattatattgatttcgtggctaaaggtgcatcaatatcaggattcccggagtggctcccctccgaacgtgttgtggagcagcgtgttatcgatacgcttcgtaaggtttttgagctcaacggcttcatcggcattgagacgcgagcggtggaaaccggcgcttctttgctgaaaaaaggcgagaccagcaaggagatttacctgctgagccgtttgcaggaggtcggtcatgaatccgacactccgattgaagagcgtttgggcctgcatttcgatctgaccgtgccgctgagccggtatgtggtcgagcactcgggtgcgttggcgttcccgttcaagcgctggcagattcagaaggtgtggcgtggcgagcgtccgcaggaaggccgcttccgcgagttcgtgcaggccgacatcgacgtgatcggcgccggcgacctgcccgaccactatgaagtggaactgccgctggtcatggtctccgcactggaagagctgcgcgcgtatggcctccccaaggccaccgtgcacgccaataatcgcaagttgtctgaggggttctaccgtggccttggcctgacggacgtcgaaggcgtgctgcgcgagatcgacaagctcgacaagatcggtgccgatgaggtggcccgactgctcaccgagacctgcggcgccaccgaggcacaggcgcgcgcctgcctcgaattggccgagctcaccgcctccgacggtgccgagcttgccgctaagttcgatgcgctgtgcgaggctcacggcatcgtcaaggattccgaggcctacacgctggctcgtcagggactcgataccctggccatgatcgtcgacgaagccgccgccatccgccccggttccgtcatcgccgacctgaagatcgcccgcggtctcgactactacaccggttccgtctacgagaccttcctcgacggtgccgcatcactcggctccatctgctccggtggccgttacgacaatctcgcctcccagggcaaccgcaagtatccgggcgtgggcctgtccatcggcctgagccgactggtcagctacatgctgcacaccgccggcgctcacgccaaccgtgtcagcccggccgccgtgctggtcgctgtgtggaatgaagaggaccgcccggccgccaatcgtattgcgaaccaactgcgtgcgcgcggcatcgctactgacgtggcacccaccgcggccaagctcggcaagcagatcaagtacgcggacaaactcggcattccgtacgtgtggttcccggccaccgctgccgaaggtgcggaaggcgcagagcccgctggcgacgaggtcaagaacatcgtcacgggcgagcaggttgccgccgattgcacgtcgtgggagccggatactgtggttgcccagcaaaccgtcgaaatctgacgtattcgcgcgaaaaatcgaggagaaacaagacaatgagccagacggcttacagaacacatcatgccactgaagtgaccgaggccctggtcggccagaaggtcaccctcgccggttgggttgaccgacgccgtgatcacggtggcgtggccttcatcgaccttcgtgattcgaccggcctcgtgcaggtcgtcatttacgacgaggatatggcccgcccgctgcgcagcgaattcgtgattcagattaccggcgaagtgcgcctgcgcccggatggcaacgagaacacccatctggccaccggcaagatcgaggttgtggccgagaccatcgagatcctcgccaagtccgacgccctgccgttccaggtttccaccgctcttgagaatgagtccgagaacaagctgcctggcgaggacgtgcgtctgaagtaccgttaccttgacctgcgccgcccgtccatgcagtacaatctgaagctgcgttccgacatggctaaggccgcccgccacgcgctggaagacatggacttcaccgaggtcgagaccccgaccttcattaagtccaccccggaaggcgcccgcgacttcgtggtgccggcccgtctggttcccggttcctggtacgccctgccgcagtccccgcagctcctcaagcagctgctcatggtctccggtgtcgagcgttactaccagctcgcccgctgctaccgtgatgaggacttccgcgccgaccgtcagcccgagttcactcagctcgatatggagatggcctacgtggaccaggaagatgtgatggccatgactgagaaggtcatcgccgccatctggaagtccgccggctatgaggtccagctgccgctgccgcgcatcacctggaaggatgcgatggacaagtacggctccgacaagccggacctgcgcttcggcaacccgctggtggagctgaccgagtacttcaagaacacgccgttccgcgtgttccaggccccgtacgtgggtgccgtggtcttcaagggcggtgccgccacgccgcgtcgtcagttcgacgcttggcaggattgggctcgtcagcgtggagccaagggccttgcttacgtggtcttcggcgaaaacggcgagctcaagggccccgtcgccaagaacctatccgatgaggagcgcaacggcctacgcgaggccgtcggtgccgaggaaggcgacgccgtgttcttcgccgccggttcccgcgagtcagcccagctgctgctgggtgccgtgcgtgtggagctcgcctcccgcgaaggcctgctggatccgaagaagttcgctttcacttgggttgtggacttcccgctgttcaagcccaccgacgatccggatgatgacgatgtggctgtcggccactccaagtggacctccatgcaccacccgttcaccatgccttccaaggattggatcgacaagttcgacaaggatcccgagcacgccatgtccgactcctacgacatcgtctgcaacggtgaggagatgggcggcggttccgtacgtatccaccgcgacgacatccaagcccgtgtgctcgatgtgctgggcatcaccaaggaagaggccgacgagaagttcggcttcctgcttgaggcattcaagtacggcgctccgcctcacgcgggtctggccctcggttgggaccgcaccgtgtccatcctggccggtgcagactccatccgcgacgtcatcgccttcccgaaggccggcggcggccgcgacccgctgaccggtgctccggccccgatttccgacgagcagcgcgccgagactggcgtcgactacgacccggacgccgacgaaaactaatctacggagcgtataccgcttttcctcagcactcgacgtacttcagtgcgccttcggcttcggacggcggtctccgcacgcgtagattaattttcgaggagtaatgctccggtgctattagccgcaaatggcccttggaataattccaagggctatttgctttttgcgggtggggcccaatgtgccaaatacctgccaaggggtgccaaatactccgcccgatggcacctccgccatgcggcaaacctcgcaccatgcggtgtcccccttggcgtttgccgattatccttccatggggcggtaacttcctcatggggcggtaaacaacccatggggcggtgaaaaccccatggggcggtaggtcaaaatggcttaattccgcggtttcacaatttcttcaaaccgccccatgggcaaattaccgccccatgaggagcgatcgcaactccgtatttgatcaatgttgtgatgctttgttgtgttttgcttgtttccgcctcctgtattcccctttgcgcgcattgatggtaaggctgccgtctattaatacccggcatgaaggttgaggacggccaggaagcggtatttgcatcgcggtggcaacctcttgtgcgaaggcacgttgtttggcggtgttccacaggtcatcggcgaacacctcgatgacggtccagcccaattgccgcagacgtcgacgtttttgctggtcccgcacatattgtttgcggaagcgacggtgatgatcgccatcatattcaatagcgactttgtattgtggataagccatgtcaacggtgtaggtgtatccgttctctgaatcggtaatgccatattgtgtttgcggtatgggcaggccgaaaagcataagcgccaagcgtgtacgagtttcctgaacggaatccgatggttttacgagcttcagcgccgcctcacaacgcgcacggccaataacgcggtgaaaggccgttagtcgttgagtgaattgttcaatggcatatccataacgtctgatgagcgcttcagccagcaccactaattcagtgaggttgagatattgggcaaactgtatccacgcatccatgggatgcatgcaggttacgccgtttgagaaagcgatactgttgaactttgcattccatatgcgatagtcgacattgtccaatgaagagcgggtccccttgctcctcaccgtcacataaaaatccttctgcggcaacgtgctgtgcctcggcaactccacgccgcataattccaatgcggtatacagcgagaaacacaacgtgcgtttcgtgcgcactttgcccagcagattccaacaggccgtgttcttggccgtggctttggcgtcaagatctttgcgcagatagttgttgatttcgccattgtgcggcacttcgctgtatccgttcatgcgccgagcgtagcgcattccacggtggcacaggggcaaaaccgaaaaatgggaataacttaagcggcgcgaaccggttatccaccggcatatcgtgtgccgcgcccggttatccaccgcgcttcgggagtgtcgtccaccgtataacagcactcatcgtgtgcgaacagctagccacgctcaaaatgcctagcgcatttatacgaatacgacatgggaaacggcgagaccagccccacacaatacaaagtgaccgccagccatgcgcccgactgcggcatacacggcagcaacgccaacgacaccaaggccaaacatggaatcagcagataggacaacacgtgcccgctttgccgtcgcagcaacgtctcggccaccacgcagcaggcaatcagcgcacagcagacgccgagcgatgcgcgactcagcgagaatgtatgccgatgcccaatgccgccttcacgatgtctgatgcggaaatgagacatcgactgagcaactgtgtggacatactgtgaacacgttggaaacgtcggtgtgttatcctcccactcatgtctgaaacgaacaatgaaacagcagtgcgttcgcgcacgacaagcacaacatcaccgagcaaggccaaattgaccccgctggttcccggcaaagaggacccgaaccgtccgctagtcgaactgacccacgtcgaaaagcacttcggtgctttgcacgtcctcaaggacatcaacctgaccgtcgccaagggtgaggtgctggtggtcgtgggcccgtccggctcaggcaagtccacgatgtgccgcaccatcaatcgcctcgagaccatcgattccggcgacatccgcatcgacggcaagcccctgccacaggaaggcaaggagctcgcgaacctcagggccgaagttggcatggtattccagtcgttcaacctgttcgccaacaaaaccattcttgaaaacgtgacgctggccctcatcaaggtgcgtcacatggacaagaaggaagccgagcaactggccatggacctgctcgcccgcgtgggcgtcgactcccaggccagcaagatgccctcccagctctccggcggccagcagcagcgtgtggccatcgcccgcgcgctcgccatgcgccccaaggtcatgctgttcgacgagcccacctccgcactcgacccggaaatggtcaacgaagtgctcgacgtgatggtcgaactcgcgcatgaaggcatgacgatgatctgcgtgacccacgagatgggcttcgcgcgcaaggccgccgaccgcatcgtcttcatggcggacggccagattctcgaagagaacacgcccgacgagttcttcgagcatccgcagaccgaccgtgccaaggacttcctctcgaagatcctcacccactgacgaacccactgaaagacgggtacgcaatccaatgacattcaccaatacgttcaaacggaaggcttgccgcgtgatcgccgcgctcgccgccgtggcctgcacaatgtcgctggcagcctgcggcgcggacgaaaccggcaagatccgcatcggcatcaaattcgaccagcctggcctgggcttcaagaagtccggcacctacgtgggcttcgacgtggacgtggccaaatacgtcgccaagaaactcggctattccgaagaccagatcatatggaaggaagccccctccaagcagcgtgaggccatgattcagaacggcgacgtggacatgatcctcgccacctactccatcaccgacgagcgcaagaaggccgtctccttcgctggcccgtacttcgtggccggacaggatctgctcgtgcgcaaggacgacaactccatcaacggccccgaagacctgaacggcaagcgcctatgctccgtcaccggttcgacctccgccgccaccgtcaaggagaagttcgcctccgaagtccagctcatggaacagcccggttacgccgaatgcgccaccgccctgttctccggcattgtggacgcggtaaccaccgacgacatcatcctggccggcctggcctccgcctcgcgcggcaagctcaaggtggttggcaaaccgttcacgcaggaatactacggcgtgggcatcaagaagggcgatacgcagctggccaccaaaatcaacaacgccatcgtggacatgattcaggacggctcgtgggagaacgccatcagcgataacaccaagggcaccaactacacgcccgacgtacgctacaacccgcccatcccggacgaaggagaggaggcctgatgagcggattcctggaactcttcagccagtatgacgtgctcggtgcgtttctggtcaatatcgaactgaccctatggtccgccctgttctccctgatcctcggcgtgatcctcgtggtgatgcgcatctcgccgatttcctcactcagggccgtggccggtgcgtatgtggaactgttcaagaacctgccgctgaccatcatcatggtgttcatggtgctgggtgcctatgcgcagctgaagctcagcttctccgacaccttcgccacgaacttcttctggctcgcggtcaccggcctgagcctgtacacggcggcgttcgtgtgcgaatctctgcgttcgggcatcaacaccgtgccgattggccaggccgaggccgcacgagcgctgggcttgggcttcatgcagtccgccaccgagatcattctgccgcaggccttccgaggctccgtggcaccgctcggcaacacgctgatcgccctgctcaagaactccaccgtggccgccgccgcatccgtggccaccgaaacatcctcgctgatgagcgagatgatcgaattccgtcccgacgtgatcatccaaatcttcctgatcttcgcgctcggctacgtgatcctgatcatccccatcggcatgctcaccacgtacctgtccaacaaactcgccgtaaggaggtgacggatatggccgatacttcgaattccgtgctgttcgacgcgccaggtcccaagggccggcgcaccattcgcatcgtcaactggatcgcgggcattctgttcgcggtggtgctcgtgcttatcctcatgcgcctgcacaacccgccggacggcgagaaccagctcagctgggagctgtggaagcccgccgtcgaacgagaggcgtggaccgacttctacctgcccggactgtggatgaccatcaaggccaccatcgtggccgtggtgggtgccgtggtgttcggcttggtgttcggcgtgggccgactgctgccgaacccgttggtacgtggcgtctccgccgtgatcgtcgagttctgccgtgcggttcccgtgctgctgctcatgatcttcttctggcgatggttcgcgttcgcgggcctgcccagcccgtcctattgggccgtggtgctggccttggtgctgtacaacggttcggtggtcgccgaactggtgcgctccggcgtcggcaatctgccgggcggccagcgtgaggcctcgctcgctttgggcctgaccgaaacgcagtcgctgatggagatcgaggtgccgcaggccgtctacgccatgctgccggccgccgtcacccagctggtcgtggtgttgaaggacaccgccctaggctcgatcatcatgtataccgacctgctgcaggaatcgcgccgactcggctcgatgtacttcaacatcctgcagacgctggtcatggccgcggtgatttacttcatcgcctgctggctgttgtcgaggctcgccgaatggctgccctcgcgcatgcagcagcgcacggccgcgcccaccgaggccgagcccgtggcgccgatcgccgccggagacccgtccaacgtcaatcagatcgcggtggccaaggagctcgaagagctgccgctgggcggtacgccgcgcaaataccatgtgcatcaccgtggcaccaacgcctcgattcgcaactggcggcgcacccgctacgaacagggatatgacgccacccagcccgagtcacaggttgacccggaaaccggcgaattccaggagtctcaaaagcctgaggacaagtcagaggcctgacggtcagctcaatcgccgctaagccggcacgaagaatttactgagtgtttgactgggctccggctacgtagccttcacggaggataggttggaacatatgaagatgttccggcacctatcctccgtttttgctattgcgaccattgcgccgctggcgttggcggccacgctagccgcgacgcctgcaatcgcacaggccgaccagctgcccaacccggattgggtggcattgctctccgactacgaaaagaactattggcaggcccccaccgatgccgaacacggtggcaaggtgctccacgccgataccatgaaactcgacgaagatttggccgtggccattaaccacaaagccgccgaaaatctcgataaggatggcctgaacgcccaacgcaagcgtgcgctcgtcgactccgatctgcaagccgaggaagccatgccggacgcgctcggtccggtgcttggcaaatatatgagcgaagggctcaaatccgggaaactcaacgccgtcgccgatatcttctcctttaacgtggcctccacctacgcctcaaaacgtgcggccatgcatccgcgcccctatctgaaccgtgcggaaagcagctacggcggcactaacgatctcgccggactgcccgccacgcttgacatcaagcaatcgccctcatggctcgaacacgtgcccggctactcgaacttgcagaaaaacagttcctacccctccggccacactaccggcgcctattcgtggggtatcgcgctggccggcatgattcccgaacttgcgccgcaaatcatggcccgcacttcggaggctggcaacaaccgcatcgtgctcggcgtgcattatccgcttgacatcatgggcgggcgcattggcgcatccgcccagaacgggcagtactggcataacgaattcgcttcgtccatcgtgcccgcgtcccggcagctgcgcgactatctggtgtcccgctgcgccgcggacggccacggcactaccctcgtcgtctgcatcgccaacaccaaggcctccggttcgggcggctacaccaacgattttctggacccagtggccaccgagccggtcgtggaccaagcctcggccgtgcgcgtctacaccgcacgcctgacctacaccttcccgaaagacaccgcccagtccggcgctgatttcgtggccccgcgcggggcggcggacgtgctgcgactggcctatcccgaactgcacgccgatcagcgcaacgcgattttgaaagccaccgccttggattccggataccccctatggcaatcgagcgacggctggcagcgtatcaactgggccaaagccctgtgcgcccgcgtcaccttggataagcacggcgatgtggccaaggtcgagaccgctgaccaagtggcgcttgccggcccgagtgtggtcaatgcccagtacatcgacgcgggcaatcacccggcgtcggatagcttggcgggtgaaaacagtgccattgcggccgggccggatctcgccaccctccatgccgtgcaacgaccggcgttgatcagcgtagctatcggtaccgctgtaatcgcgattatcggcggaatacggacggttcgacgcaaatccaagaaccagcttcagcagtaattcagccaaagttcagtcgcgctgctcaccgctgcggtgacactgagcagcatcgccctgatcggcgtgcccgctgcgactgcggacgagcagcagaccactgccgaacagaacacggctgccaaaccatccgtaatcatcaacgaggtctatgccggcaatacgaaagctgccggagacccggatagcaagcgttgcgattgggccgagctcaagaacaccggctccacagacgttgacgtgaagggctggggcatctacgacagcggtaagaaagccaagaagcactacaccatcggcgccagcgaagtaacgaatacggacaccgtcatcaaagccggcggatatctggtggcatacatcgaccccgacaaggcaaagcctgccaaaacctgcgatgccgctgccgatatgaaagtctcctcgatcaagagcgacaatctgatagtcacgattctggccacttcgaattgtgatgataagaacgcatccacgaaattcaatgattcggccacccgactcacgttgcaggacagcgacgataatgtcgtggccgatgccgtgttcgatttttcgggtctattccacgtataccgcgcagttgtccagcaagcgcaagggtatggaggctgaaggcaagacctggaactaccgcgatattcttgcgcaattcatcacgatgcacaacaagaattcaaacgtactgcttatctggtcgggtgactggcccgcctacagcagcaattccgacaaatactatgtgattcttgccggtgagggcttcgactcgacggatgaggcttggaattggtgcaaagccaacaattacggtccgaacgactgcatgcctatagatttgcagtaacaagtggaatgtgaatgtcgctacgttgctgggtctcctgagttacaagacgtacaatcgggagcatggccaaggacgacgacagaaccaacgagcctgaagaggccggcaagtggggtacggccggaaaatcctcaggaaagaacaacaagaacggcaagggaaaggaatccaaaaccgatcgacggatcgacaaggtattacagctcgcggtggatcgcatagacaccatcgactccagtgccagcgtgcctgaacgactggcgcgtgcggcgaaatccagtgaactgctcagcgccgtatggtcgttgccgcccgctcaacgtcttatgttccaccacggcatgcaggtcactgatgtcgaaggcgattccactcccggattcgacggcaataaagaggacgccgagaagttcatttcgatcagctcctccgaaatcgcccgataccagcggctcatgtacgcgaatggcgtcaaaggctcgacacggcggctgctcatcgtgctgcaaggcatggatgcctccggcaagggcggcattgtgcgtcacgtgttcagccaaggcgacccgatgggcatccattaccatggcttcggcaagcctacggccgaggatctcgaccacgacttcctctggcgtgtgaagcgtgaattgcccaagccggggtggattgccgtattcgaccgctcccattatgaagatgtggtcatgccgcacgtctatggcacctatcccgaagacgtatggcgtgcccgctacgaccagatcaacgatttcgaacgtgaactggccgccagcggatgcgccatcctcaagatcttcctcgtggtaagccaggaagaacagaaaaaacactttcttgggaggctggatgatcccaccaagttctggaaattcgatatctccgacctcgaggcccgcgaccgatgggatgagtacatgttcgcttggcaggaagtgttcgagaaaaccagcacggccgccgcaccgtggtacctcgttccggccgataaccgctggtattcgcgagccgtggtctccgaactgctgcgcaccaccttgaagaacatgaacatgacctggcctcccctcgaacccgaggtggaccccgacgaggtgcgccgccggttggcgtgagcgatcctcccattggcggagccaagcgcatggcacagctcttcgcatggctccgcccgctggcgggaggcgtcgcatagcgacggagggcggctcgtgccgtcggaataggccactaggtagactgagcattatgactgacgagaaggaatacggatccctggggcggctggcccccgaatgggacggcgacggacgcgaacggaatcttacggccgatgacatctacgaacggttcttcggctgggtggaagacgtcaagggcatcgagccgtggccgcatcaggaagaggccattatggacctcttggccggcgaccatgtgattttgaataccccgaccggttcgggcaaatcgctggtggcgcttggcatgcacttcgccgccctgtgcactggccgccgctcctattacaccgctccgatcaaggcgctggtgtcggagaaattcttcgacttggtcgaagtgttcggccgcgacaatgtcggcatgatcaccggtgacagccacatcaacgcggacgcgccgatcatctgctgcaccgccgaaatcctcgccaatcaggctttgcgcgaaggcacccatgccgatgtgggccttgtggcgatggacgaattccattattacggtgatccggagcgcggttgggcgtggcaggtgccactgctcacgctgccgcagacccagttcctgctgatgagcgccacgctcggcaatgtggacgccattgccgacaagctctccgatctgaacgacaccccggacgtggatgtaatcgccgacgcgccgcgaccggtgccgttgagctacgaatacacgctcgatccgatggaaaaaaccgtggaactcgccttccgcaacggcgaaaccccgatttacgtggtccacttttcgcaggacgccgcattggagaccgcgcaggcgctcgcctccaccggtgtatccagcaaggaacagcgccaagccatcgcagaagccatcaaaggcgtcaagttcaccacagccttcggcaagattctgcagcgactgctgcgcaccggtgtcggcatccatcatgccggcatgctgcctcgctaccgccgcctggtcgagcagctcgcccagcagggtctgctgccggtgatttgcggcaccgatacattgggcgtcggcatcaatgtgccgattcactccgtggtgctcacggccctgaccaagttcgacggcaccaagatgcgccgcctgcgcgcccgtgaattccaccagattgccggacgagccggtcgtatgggattcgataccgagggactggtgatcgccgaggctcccgaatatgaaatcgaaaaccagaaggccatcgccaaggccgggggagatccgaagaagctcaagaaggtcaagcgcaagaaggctccggaaggttttgtgacctggaaccagagcacgtttgataagctcatcgacgctgaaccggagaccctggtcccgcacctgaaaatcacgcattcgatggtgctcaatgaagtggcgcagggcggtgacgcccgtgcccgtatcgacgatctcatcgacgattccgcgcagacccccgaccagaaggagcatctgcaccagcgggccgacgagattttccaaaccctgttcgataccgaagtcatcgaaaccgaggaccgcaaggacggcggcaaggactactacatgacccttgatatgccggacgacttcgccctcgaccagccgctctccccgttcctgctggccgcgctcgaactgctggaccccgagtccgacacctatgcgctggacgtgatttccatggccgaggccacgctcgaagaccccaagcaggtgctgcgtgcccaggagcgtcaggcccgagacaaggcgatggccgatatgaaggctgacggactcgactatgacgagcgtatggataagctgcaggagattacgtatccgaagccgctggaagacatgctcgaatccgcgttcgatcagtaccgccacgatgtgccgtgggccaacgactactggctgtcgccgaaatccgtggtgcgcgacatggtggaaaccgcctccgacttcaccggatacatcacccgatacaacatcgcccgctccgaaggtaccctgttgcgctacctctcggacgcctaccgcacgctggcgcgtaccgtgccgcccgaaaagcgtgacgagcaactcgaagacatcatctcgtggctgcgcgtgctcgtgcgctccatcgactcctcgctggtggatgaatgggagaacgccggtgactcggctgaccaatccgaggctgcggcatccctggccgcgcccggcgcaaaaagcgcggtggtcgaggaccgtcgtggtcttaccgtgctggtgcgcaatgccttgttccgccgtgtgcggcttatggaccttgaccagccggacaagctcggcgcgctcgacaaggactggggctacggtgtgcacgaatgggaagatgtgctcgacgactactacgacgagcacgagtacgtgggcattggcgccgaagcgcgctcgcccgaactgttcatgttggatgacaagcacgagaacgacgagcatacgtggaaggtgcgtcagattatcgatgattccgatggcgatcacgattgggccatcgaaggcatcgtggaccttgacgccacccaagacaccggcgaagtagtcttccacgactacaaggtgagtaactgattcctttcttggctcccctctctgagggaagccagggtgcagctcgaacgtctgttcgaacactggggtactataggacgttatgagtgagaacgatttgtttggggcggctgatgcgccggagtcgatgacgcggccgttggcggtgcgcatgcgtccacgcactttggacgaggtgattggccaaacgcaggtgttgggccagggctcgccgctgcgccgcctcgccaatccggccagcaaaggcagtctcaccgcgccgagctccgtaatcctgttcggccctccaggcgtcggcaagaccacgctcgccaccatcgtggccggccaatccggccgcgtgtttgaggaactctccgccgtgacatccggcgtcaaagacgtgcgcgacgtactcacccgcgctcacgaacggctcgtgtcacgcggccgggaaaccgtactgttcatcgacgaggtgcatcgcttctccaaatcccagcaggatgcgctgcttcccgccgtcgaaaaccgcgacgtgacctttatcggcgccaccaccgagaacccgagcttttccatcatcaaaccgttgctctcccgttcggtggtcgtcaagcttgagtcattggagcctgatcagctcaccgaactggtgcagcgcgcgctgactgatgaccgcggtctcaggggcgaggtcaaagccacggacgaagccatcgccgatatcgtgcgcatggccggtggtgacgcacgcaagagtctcacgattctggaggccgcggctggcgcggtcactggcgacgaagcccgcaaaaagggcgcacgccgacccatcatcacctccgaaatcgtggctacggtaatggacaccgccaccgtgcgctacgacaaagacggcgatgaccattacgacgtgatttccgcattcatcaaatccatgcggggctccgatccggatgccgccatccattatctggcgcgcatgctgaaagcgggtgaagatccgcgcttcatcgcccgtcgcatcatgattgccgccagcgaggaagtcggcatggccgccccgcagattttgcaggtcaccgtggccgcggcgcaggccgtggcgctggtcggcatgcccgaggcacgtattattttggccgaggccacgattgccgtggccaccgcgcccaaatcaaatgccagctataacgccattaaccaggcgctcgcggacgtggataccggcaagatcggcgctgttccgctgtatttgaggaacgcccccaccaagcttatgaaagagtggggcaaccacgagggctacaaatatgcgcacgattggcccggtgccgtggcgccacaggaatatatgcccgaagagctgcgtggcaccgagtactaccatcccaacgatcgcggctatgaacacgaagtcagccagcgtcttgccaagattcgcccgatactgcatggtggggaacccgaacagaaatgaacataggggagtaaagtgtaacgcaacaataacagtggaaaaggggaggcaaacaccatggcgaccatcttcatcgtggacgatgatcaggccatcggcgaaatgcttagtcttgttttggaaaacgagggattccagaccgtgacctgcctggacgggctgagggctgtggaaatgttccccatcgtcaagcccgatttgattctgcttgacgttatgctccccgggctggacggcacgggggtggcccgccgcatcagagctacctctaatgtgccgattatcatgctcaccgccaaatcagacacacttgacgtcgtggccggcttggaagccggtgccgacgactacgtgcccaagcccttcaaagtagccgaactgctggcgcgtatccgtgcacgcttccgcatcgccaagccggccgccgaagacggtgccaccggtggcgcaagcggtggcaatgcaaacgtcaaccatctggaacgcggacccatcgtcatcgaccgtttggaacacaccgccaccaaggatggcaaggacctgaatctcactccgatggaattcgagctgctgttcatgcttgcggccgccgccggcgaggccatcagtcgttccagcctgctcaagaatgtctggggatacgagaattccggcgatacgcgcctggtcaatgtgcatgttcaacgccttagggccaaagtggaggacgaccccgagaacccgcaaatcgtgcagaccgtacgcggtatcggctacaagttcgtcactcctgaacaatgaacctgcgccctcgattcagcctcaaacgcttgctgcgccacggacgcgctgaagttcgtcgctcgctgcaggcccgcaccgtggccctcaccgtgattcttacgctggccgtggccatcgtcttctctggcgtatcgatggtatcagtgcgcgcctcgctgcttacccaaatcacttcgcagtcgcgtgccgactattcaaacatggtgcagcaggcccaaaccagtctggacgcggccgatgtctccaccgcagtgcagatccaacagctggtcaatgacttggcgtcctcgttgcaatccgaggggtcctccaacctgataggtgtgtatttgtggagtcgtgataccaactcgcgtgccatcatccccgtatccaccgaacccagctatcaaagtctgatttctgacgacatccgttcatccgtggcttccgacttggatgacagcgtgttctatcagccggtcgaaattcccggtgattccggcatgccgggcagcgggacgcccgcagcggtgctcggcaccgtattggactttggcgtggccggcaacctcgaattcttcgccatttattcgtacacgttccagcagcagtccttgacgcagattcagctcagtctggtggtcatctgtgcgttgctgtccatcgtggtgggcgtagtaatctggctggtgattcgtggcatcgtgcgcccgattgaacgagtggcagcggcctcggaaacactggcctccggcaatctcgatatgcgcgttaccgtggatcgtaaggatgagcttggtgtgctgcagcaatccttcaatacgatggctgatgcgctcaaccagaagatcgatgagctggaggaagcaagcgttttccagaaacgatttgtgtccgacgtcagtcatgaattgcgtaccccggtgaccaccatgcgtatggcttccgacctgctcgaaatgaaaaaagacggcttcgacccctccaccaagcgtacggtcgaactgttggccggccagatcagtcgattccaagacatgctcgccgatctgttggaaatctcccgctacgatgccggttatgcggcactcgaccttgtggaaaccgatttatgcgaaccaattgaaacggcagtggaccaagttgacggcatcgcccaagccaaacgggtgccgattcacacgtatctgcccaatgtgcaggttttgactcgtatcgattcgcgtcgagtgattcgcatcgtcagaaatctgttggccaatgccgtcgatttcgctgaggaccggccgatcgaagtgcgcgtcgcggccaaccgcaaagccgtggccatcagcgttcgcgactatggcgttggtatcgacgaagacaaagtcgctcatgtattcgatcgattctggagaggcgacctttcacgttcacgcgttaccggcggcaccggattgggcctgtccatcgccatgactgatgccttgctgcaccacggtagtatccgtgtacgttcggcagtgggggagggcacctggttcttggtattgctgccgcgtgaccccgaccaaggtgaggtggcggacgctgaactgccggtgaattttgcttctgaaacgccggatgacctgcgtgttaccggtgggtttggtgtggccaccagccaagtcacacatgattatcatgaggttcgccgcgacacgatgatggggaggccactatgagacgagtgaccagaacgattgccgccgcaggcgcggccatagcctgttgcgtcacgatgacggcatgctcaagtccgttcgatttgccgattagcggctcggtgcagactctggcaccggtggaacagcagacccagcgtgtttacaccaatcctcaggggcctgcggacgatgcacagccggaaaccatcgtcaaagggttctatgacgctatgcctgctggcgtgcagtccgatggctatcgcgtggctcgcgaattcctgactggctcggcttctgccgggtggaatggagattctgcggcactggtatacagcggcacccctgatttccgccgacgcgccaacaccataagcgcgccacaaggtgcggaaagctcactgattgtggaagtggaacttcaggtggtgggttccttggattcgcatggcgtatacacgccgtcaaacagcacccaaacgcgcaggcttccctatacgctgatgaagaaaagcggccaatggcgcatctcgtcattggaaagcggcgtggtgatttccaccgcagattttgaacaggtgttccgccaagtatccgtgtatcaggtgagtacttccggcaagcaacttatcccggatattcgttggttgagctggcgcaactggcgcacccaggcagtcggtgaagtgctctcggatgcaccctcctggttggaaggagtgctgcgaggcgccggcttgtctaccatcaaactcgcggtcgacagcgtgccggtgaagaacaatgtggtggagatacacctcaacagcggtatcaatgcgttgaacgaggaagaacgaggcctgctggtacatcgcatccgtctgactatgggcgacggcaatgccgaatacgcgctgaggattaccggcgatggagtggactattccgatgccgacgcaaatgtgaaacttactaccgagcagccgacagcgggcgtatacacgttgaccggtggtcatatcgtttccctggccagctccagtccgttgcgtgtaggggaggcccccggatatgacgatgctcggggcttcgttttttcctcatccggcggcgcggtgttgcgtgcggacggcgtggtcgaatgcctgaaatctgatggtgcgtcctgtggggtgatgttctccggcgagccgatgcgatcgattaccgaaggtctggatggcgaagtatgggctgtatccgagaacgggcgcgaattgcatgtgtcagatgggggcaaggaaaccgatctgaagcttgattggcttggtgctgccgacagcattgtggcattggcggtttctccggaagggtgccgattggcgttggcagtcgagggcgaggacacgaacggcgtgatgatgaccggtgtggcgcgcaacggtgataaaacactgagcggtctgagcaaagcggccacccaagtgagtgtgctcaggcacgtcaccatgctcacgttctacaatgatctgaatctggtgtacgccaccacacctcctgagggaaacagcgaacaacaagaggcatggcgtcaaatggcaccaggcccggccaatgcgcagcgtttacccaatggaatcataacgtcgatggcatcggggcagatcagcctgtcccgtcgcctggccattgtggacgatttgggtattgttcgctccgtttctggctcactcgacggttcctggaccatcgccgatagccaggtcactgccctcggtgcgcagtagatggtataagaaaaacggtgttcataataacctttcttgttgtatgaggcaacggctttgtcgctcggctggcgagcggcattgccgctgcgcaaccaatcactattattggtctgttatcaaggcaaaacagtgttgcgacgccatttttgaaccactgttattaatttgttataaacctgttatcaaactgttatcgcatgcgattgaacatttggcctgtgagcgtcatactagaggctgtcgatgacgaacagtcaccaaacaggatgaaagatcatccaaaaaataaacactgctcgaggaggagtatttatgaagaattggaagaaggccattgccctcgttgcttctgctgctgcgcttgtcagcgttgccgcatgcggttccagcaacgcaggtggcagctcggactccggcaagaagacggttggcttcgtggctgtcggtcctgagggcggcttccgtaccgccaacgagaaggacattcagaaggcattcgaggatgccggctttgacctgacctactctccgacccagaacaacgatcagcagaagcagattcaggcgttcaacaagttcgttaacgacgaagtcgacgccatcatcctgtcctccaccgaggattccggttgggatgactccctgaagaaggccgctgaggctgagattccggtcttcaccgttgaccgtaacgtggacgtcaaggacgccgaggccaagaaggccatcgttgctcacatcggaccgtccaacgtctggtgcggcgagcaggctgccgagttcgtgaacaagaacttcccggatggcgccaacggcttcatcctcgaaggccctgccggcctgtccgtggtgaaggatcgtggcactggttggggcaacaaggttgcctccaacgtcaaggttcttgagtcccagtccgctaactggtccactgatgaggccaagaccgtgaccgctggtctgctcgacaagtacaagtccgacaacccgcagttcatcttcgctcagaacgacgagatgggcctcggtgccgctcaggctgttgacgccgccggcctcaagggcaaggtcaagatcatcaccatcgacggtaccaagaacgctctgcaggctcttgttgatggcgacctctcctacgtgatcgagtacaacccgattttcggcaaggaaaccgctcaggccgtcaaggactacctggatggcaagaccgttgagaaggacatcgagatcgagtccaagaccttcgacgccgcctccgccaaggaagctctggacaacaacacccgcgcctactgataagtctgctgcgactcattgataactggaccaaataattgatgtgatggtgtgagaaggatgttccttccacgccatcactcatgtgtggctcaaatatcacaaaacgataacacttcattctcgtttaaggcaaagacatgacagataaaaaccccatcgtcgtaatgaaaggcattacgattgaattcccgggcgtcaaggccttggatggtgttgatttgactctctacccgggcgaagttcacgccctgatgggtgagaacggtgcaggcaagtccaccatgattaaggctctgaccggtgtgtacaagatcaacgccggctccattatggtggacggcaagcctcagcagttcaacggcaccctcgacgcacaaaacgccggtatcgccaccgtgtatcaggaagtgaacctgtgcaccaacctttccgtcggtgagaacgtgatgctgggccacgaaaagcgcggccccttcggcatcgactggaagaagacccacgaggccgccaagaagtatttggcacagatgggcctcgaatccattgacccgcacactccgctgagctccatctccatcgctatgcagcagctggtcgccatcgcccgcgctatggttatcaacgccaaggtgctgattctcgatgagccgacctcttcgctggatgccaacgaggtcagggacctgttcgcgatcatgcgcaaggtgcgtgactcgggcgtggccatcctcttcgtctcccacttcctcgatcagatttatgagattaccgatcgtctgaccattctgcgtaacggccagttcatcaaggaggtcatgaccaaggacaccccgcgcgacgaactcatcggcatgatgattggtaagtccgccgccgagctgtcccagattggtgccaagaaggctcgccgtgaaatcacccctggcgagaagccgatcgtcgatgtcaagggcctcggcaagaagggcaccatcaacccggttgatgttgacatctacaagggtgaggtcgttggcttcgctggcctgctgggctccggtcgtaccgagcttggtcgactcctgtatggtgccgacaagccggattcgggtacctacacgctcaacggcaagaaggtcaacatctccgatccgtacacggctttgaagaacaaaatcgcgtactccaccgaaaaccgtcgtgatgagggcatcatcggcgacctgaccgtccgccagaacatccttatcgccctgcaggcaacgcgcggtatgttcaagccgattcccaagaaggaagcggacgccatcgttgacaagtacatgaaggaactcaacgttcgtcccgccgacccggatcgcccggtcaagaatctctccggcggcaaccagcagaaggtgctcattggccgttggctggccacgcaccccgagctgctgattctggacgagccgacccgtggtatcgatatcggtgccaaggctgaaattcagcaggtcgtgcttgacctggcttctcagggcatgggcgttgtcttcatctcctccgagcttgaagaggtcgtgcgtctgtccgacgacatcgaggttctcaaggaccgccacaagatcgcagaaatcgaaaacgacgacaccgtctctcaggcgaccatcgtcgaaaccatcgctaacaccaacgtaaacaccggaaaggaggcatgagatggctgaaaaggcaaaagccgagggcaacaactttgtcaagaagctgctgagcagcaacctgacctggtcgatcgtcgcattcattcttctggtcatcatctgcaccatcttccagcatgacttcctggctttgagctggaacagcaacaccggtggtctggccggcccgctgatcaccatgctccaggaatctgcccgatacctgatgattgcaaccggtatgaccttggttatctccaccgccggtatcgacctttcggtcggttccgttatggcagtggcaggtgccgccgccatgcagaccctgtccaatggcatgaacgtgtggctctccatcctcatcgccttggctgttggtctggccattggctgcgtcaacggcgctctggtttccttcctgggcctacagccgttcatcaccaccctgattatgatgctcgccggccgtggtatggccaaggtcatcacctccggtgagaacaccgacgcctccgcagttgctggcaacgaaccgctgaagtggttcgccaacggcttcattctgggcattcccgccaacttcgtcatcgccgttatcattgtgattctcgttggcctgctgtgccgcaagaccgctatgggcatgatgattgaggccgtgggcatcaaccaggaagcctcccgtatgaccggtatcaagccgaagaagatcctcttcctcgtctacgcgatttccggcttcctcgcggccatcgctggtctgttcgccaccgcatccgtgatgcgtgtcgacgtggttaagaccggtcaggacctcgaaatgtacgccattctggcagtcgtcatcggtggtacttcactgctgggtggtaagttctccctcgccggctctgctgtcggtgctgtaattatcgccatgatccgcaagaccatcatcaccctgggcgtcaacgccgaggcaactccggccttcttcgccgtcgttgtgattgtgatctgcgtgatgcaggctccgaagattcacaacctgagcgcgaatatgaaacgcaagcgcgcgctcaaggctcaagctaaggcggtggcagcatgacaacagctacggcaaacaaagtgaaggctcccaagaagggcttcaagctcgatcgtcagatgatcccgaccctcgcggccgtggtgatcttcatcctgatgatcatcatgggtcaggcgttgttcggcacctacattcgactgggcttcatctcctccctgttcattgaccacgcctacctgattattctggctgtggccatgaccctgccgattctgaccggtggtatcgatttgtctgtcggtgctatcgtggccatcaccgcagtcgtcggcctgaagctggcgaacgccggcgtgcccgccttcctggtcatgatcatcatgctgctcatcggcgctgtgttcggcctgctggccggcaccttgatcgaggaattcaacatgcagccgttcatcgcgaccctgtcgacgatgttcctggcccgtggtcttgcctccatcatctccaccgactcgctgaccttcccgcagggcaatgacttctcgttcatctccaacgtgatcaagatcatcgacaatccgaagatctccaacgatctgtccttcaacgtcggcgtgatcatcgcactggtggttgtggtcttcggctacgtcttcctgcaccatacccgcaccggacgcaccatctacgccatcggcggctcccgttcctccgcggaactcatgggtctgccggtcaagcgcacgcagtacatcatctacttgacctctgcgactctcgccgccctggcctcgatcgtgtacaccgcaaacatcggctctgccaagaacaccgtgggtgttggctgggagctcgacgccgttgcctccgtggtcatcggcggtacgatcatcaccggtggcttcggctacgtgctcggctccgtgctcggctctctggtccgctccatcctcgatccgctcacctctgacttcggtgtgccggccgaatggaccaccatcgttatcggtctcatgatcctcgtcttcgttgtgcttcagcgcgcggtgatggcggtcggcggagataaaaaatagcggtgcccgctcggtctccgcaccgaatacgacacacaccataactgaataggcgggatcagcccggctgctgtgatggcaaggtcacagcagccggcactgcccgccaaagctttctttctccttttcttcctttcattagcgtgtggggcgtgacccgggattctcccggggcacgccccacacgtgtttggaaagctgggactctattggtaatcagatttatgcacgcttacgtgccgcgcgaatgcggaacgcggtggccagacagcaccagccaatcaggcagataaccgtcatcgttgcaaacgtccatgtgccgccgacggcagtggcgtgagcaaactcagcggtgccttcttctcctgcgccggcctgagccacggaaagaatcgtggagaacagtgcggtaccggcagcgccgccaaactgaagacacgtgttgaaaatggcgttgccgtccggcttgaactcgggagagacctccgacaggcctctggtcatcacattcgcattgccgatggaatagaacagaccgaaaatgaaatagaatccggcgagcagcacgggcgtaagctgcatcgagaacaccagcataagcactgggcccaaaatagcgatgccgagcggaatcagaatcggcttgaccgcgccgaacttatcgtagaaccagccgccaagcggggcacagacagcgccgaccagtgcgccgggcagcaccagagagccggccacaaatgccgtggtgccgagcgagagctgtgccacattggtgatgacatagccgtagccgatggcgaccaatggcagcagcagatatgcgcaggcgtgtaacagtacggcgggatccttgagaatgccaaggcgcagcagcggggagaaggcacgcttggaactcatggcgaacacgatcaacaaggcgaggcccgcaatcagactgacaatggcgataatgccggagcgtgtggctgacttgccggacaccgccgcactgatggccacgccaccttggttgagcgccagcaccagaccgaccaacgcgacaacaatggacccaagctgaatcgggtcaagataggcagcctcggtcggtgtcttctgctcaatgcacttcatgccgatgcatgctgcgattagcaccagcggaatggcgatgacgaaaatcgcgcgccacggcagcactgtggtcaccgcgccgccgacggtcgggccgatggccggagccacggtaatgaccagcgatcctacgcccatcaatcggccgattttcgaacgaggagactgctccaggatgatgttgatcatcaacggcgtggccacgcctgagccaatgccctgaataatgcgggcgacaatcagcagcgggaaggcttgggcgacgatcatgatcagcgagccaacgatggccagaatcacagccgcaagaaaaatggttttcagcgcgaatcggcgcttcaaaaacgagctgatgggcatggtagcggccaccgccaacagataaatcgtggtaatccattgcacagtggccgtgtcgacatggaattcgcgcatcagtgcggggaaaagcacggtcatcacggtttcggtcagaatgccaatgaaggcaagtgagccgacagccacaatcgcgccgataagacgtgtgggaatcttctcgttatcaatatgctgctcaggcatacatgctcctaaacgttcggttgcaaggtatggaatgtaaggtttaccaaccggcgtaggtacctgtgcgtgcggataaaccggcaatcgtactgccttggctgcacgctatggaatcacaaaaccacctgtgagtgtacggttcggggcggacgctacggtcgatgcgcaatgggttgtcccttggtttggtggggtttgatggggcggattcggcattggtccggtagcagttcggcattggttcagcatgaggaaaccgcgataatatctgccctgccgcctagtttggtgaaccatgggtattgagaacacgcataagctgattgtcaactgcctgccactcaacgaaggagaacggcgggctttcgccaaggcggctcgcgatgtgccgcaggaattcgtgggcgacgaagcgcaccgcggcgacatggtctggtcggccgctgttcccgaggagcttcgttcccaagctaccgcagtcatcggcaactttccggtctcgcaggcttcccaatacacccgtcttgaatggttgcagaccttcagtgccggtgtggatgcgtacatctgcccgggtgtgctgcctcgcggcactatggtcaccaatgcgagcggcgcgtatggccaaagcgtgtcggaacacatgttcgccaccatgtgggcattgatgaagaacctcaaccggtatgcctccaatcagcgtgatcatcagtggcaggatgaaggaccggtattgagcccggaaggtggcatcgcgctgattatcggcgtcggtgacatcgggtcgcatttcgctcagcttgcccaatccgtaggtatgcgtactttcggcgtgcgccgtcatgcggacgtgccggccaagggcattgaaaagatgtatggcttcgagcggctggagacgctgttgccattggcagacgtggtggcgatggcggtgccgcgctcgccgcagacccatcatctgctgaatgcggatcgtctgggtcgtctgaaatccacagccatcgtgattaatgccgggcgtggcgacgccatcgatcccgaggccttggctgacgccttgcacaatggacggctccacggtgccggattggacgtcaccgagcctgagccgttgccggcggaaagtccgttgtgggatgagccgcattgcctgatcaccccgcatgtggccggcggcaatcatttggaaaagacttccgaacacatcatccgcatcgccctgaccaacgtttcccgctatgccaaacagcaggaactgttgaatctcgtgcgatactgattcgcctgtgtcgggcggcgggcggccatcgcctgacactgaatacagataaggggcgtataacaccgttgttatacgccccttatcgggcaatccgaaaaagatggttgatagtcagtaccaatcagtactggttcgcgccgataccctcgaacttcacgttgaagccacgctggtaatgcaggaacatgctggcgccatagcggtcgaccggacggtgcgtgaacagcatacgaatggcgaatgcggtctgcacgtccttaggcagcgccaggaatgcttggtgggcgtcccagtacgggtcgtacaccacggcggcaccgggcacgtaggcgtaaccgtagccatcctcgttgacgtatcccatgaacggcagatcccaggcgttgtgtttggtgagttgtgccttgaagtcctcgacctcggccaacgccgcgtcgctcaggccgaagctcttggccacttcattggccttggttgttttcgaatccgggtccttgccgaacatatccgggttgacgatgatgacttttccctccgccataatgtgttcctttcagcatggcgttccccaagcaagcacctagggaagtactggcattgttcgattcacatatgaattgaacaacatgttaccttctctgtagaaaaggattgtgcactttgttgatgtgctggtttcaaagcctagcgtgaaaaatggcggatataagccgttttgccggttattaatctattggtaatgcaattgggaagttatggtagtctgtgatgtctgatgttcatatcttgcaaaagtgaacatgataaatgtttgttttgagggtgaaagcaacaaagaaaacggccgtgtacatgaactcatgtacacggccggcgtgtcgcatcccgctgcgactgcggcatcgagatgatacctgcagaggcgtggttgatcaggggcccaatgaacgtggcccgaggttagtttcagtctgatagttcgtagccgttggcgtctttatgccacggtgagccgggcttgctgcacagaatgatgatgccttcaacaaagccccagatggcggctgcgattgggccgagtccgagcagaatccagccgacaagcgtcagcagcagctgggccacggccttgccggtgttgccgagatagaagttgtgcacaccaagtccgccgaggaagatgcccaacaggccggcagccagcttggacttggacgattgccccaccggggcggcggcatacggagcggcggtgtattgcggctgcgcgtaggcgttcggctgctggtaagcctgtccatagccgggctgctggccgtagcccgctgcgggctgtgcgggctggccgtactgcggctggccgtactgaggctgagcgtatgcgccggcgggctggccgtattgcggttgctgctggccgtagcttccggcggcgggttgagcgtatgcggcgggctgtggggcgccatagccctgcggctgctgtgcggcatcttggccgtaagacggttgtgccggctgtgcgggctgtgccggctgcggaacactgtccgaaccgtacggttgttgttgattatcagtcatgcgggtcagtcccctctcaatcgggaacggcaataccttcttaccgtttctgcacaacatcatctcatgttttgcccaatagtaaaacctgccgcgctacgattgggccatgagaagtttcctgaccagctggttgattatgactatcgccgccgccgtcatggtcgcggtgactcccggcatgaccccggtgggggagcctccgattctcggcatcgccgcgttcgctttgttcatggcgctgattaatgcgtcaatcaagccgattgtgcatctgatcgcactgccgtttgcgattctgtctctcgggctggtcaccttgattatcaattggctgttcatgcgactcgccagctggctggcggtcagtctgttcggcgtgggcgtcttcgtacacggtttctggtggtcggtactggggtccttggtcctgaccattgttgcgggaatcgtcgggtccatcttggatcagtgacggtgctcgctgggcgaatatgagtaatggcggttggaatcggactgattccaaccgccattactcatatcaagctacgggatcgagcggggcgaacattactcgcgcaccaagcggatatgctccacatcgtcgcgccgggagcgacggaacagcacgaaacgattgccgatggactgcaccacttcggcgttcagctgctcggcaagctcggcggcggcttccttggcggtcaggccagaaccgtcctgcacggcgcacttgatgagctcgtgcttctcaatggtctcatcggcctgattgacggccgactcggtcaaatcgttcttgcccacatagaacaggggcttcagcgagttcgccatcgcgcgcagctgcttgatttgcttcttggtcaatgccatgggaatttccttacatctttcgtataaccacaccagcatagcaaccggtgctgtctgcgctgtttgccgccctacagcgcgatgatggccgcgatgtagatgatgacggcagcggcgaatatgagatctcgcgcggcgatggtcagggcacgccagtgggtgcggcggatgccctcctcgtagcagcgggcgtcaagtgcgaggctcaggttgtccgcgtgacgcaacgtgccggcgaaaatcggcacgataatcgcgctcatcgccttgatgcgctgggccagtgaaccggtttcgatggaaccgccacgcgcggattgggcgtcgacgatggcgcgggtttcgtcggtcagcgttggaatgaatcgcaatgccagactcatgaccagcgcgatttcttgggcatggataccgagccggttgagcggactgatcaaggtggcgaaggcgtcggtcatggcggtaggcgtggtggtagtgaggaacaccgcgcccagaatgattaccaatgcgaaacggcaggcgtacagcacggctatggtcacgccctgatcggtgatgcttagcgggccaagcgccaccaccggcgtgccggtgcgtaccacaaacagattgaccacgcccatcagcaccagcaggatcagaatcggatgaatggattcaagcacccgtaacgggttcaggcgtgccgccgcgataacggccagggtgatggcgatgcccagcgcgagctgggttggcgtgttcaccgcgaacatcgtgaacatggcggccaggaagcccaccatcttcacgcgcgggtcaagtcggtgtatcactgagtgcgcagggccgttggaggatacggccggctcggtgacggtggccgtgacggggccgccggatgcgggggcggcaatcggcatacggaccacgcggtcggcgatttgctcggcctcctcccggtcatgggtgatgatgagcacggtcacgccacgcgatttgagcgtgcgcaacagctcatggatacgcttcttggcttgggcgtccagactcgcggtcggctcgtccatgatgagcacgtcaggattgcaagccagcacgccggcaatggctgccaatcgttgttgcccgccggacaggtcgaagggggagcggtcggcaagatgcccgatatgcagcagttccagtgattcgcgcacgcggtcggctacctcggtctcgccaagcccttggttgcgtgggccgtacgccacgtcctcggctaccgtgtcagcgaacagctgatgctctggatgctgcatcacgtaacccacatgccggcgcaattgcgctaattgcttgcgattcgccgacttcgggcgcacgttgcgaccgcgcttgccggtcgaggccaccggaacaccggccacttcgatgctgccggcggtcggcgcagtcagtgcgcacaacatgcgcaccagcgtcgacttgcccgaaccattcacgcccatcagtgccacggtttcaccgcgcgcgatggtgaacgacaggtcatcgataaccgcccgtttggccgaaggatagcgataggtcagatgcgagacgcgaataatggggttcgtcatatcaccgatgccatcggagagcagcggcagttcggagccgtcttcgcgctcccgctggcgggggctgtcgttcgtagggcgactgggggcggcttctgtgccgatactaccctcagtctcgctttgcgagacagcctccgctagcggggatcgattatcgacggctgcagtgataccaatgattcgcccggcctccatgtgcacgatgcgatcggcatgaacggtttcatctggatgatgcgtgacatgcacaatagtggtgccgcgcgcctgcaaatcatccaaaatgcgcataacttcggcgcgtgcggattcgtccagcatggcggtcggctcatccaataccagcattgccgggttcatggccagcatgccggcgatggaggcgcgttgctgctgcccgccgctcatacgggtcgggtcggactggcgtaagttcgccaaccccacggcctgcaatgaatcaacgatacgctcgccgatgagctcgcgctccagcccgagattctccgggccaaaggccacgtcatcctccaacacggtggtgaccagctgatcctcgggattctggaacaccataccgatgccgtggcgggcagcacgataggcatcggcattcgggccggctgcgtacacgcgttgccccagtaacgtcacttcaccaccgtccggcgcggtcaatcccgcaatcagacgggctaacgtggatttgcccgacccgttcggaccgaccaagcataggcgctcgccggcatggaccgtgagtgaaacgccatccaaagcccatgaggtgccgcggtcatagctgaaacgaatgtccttgagcacggcggcgggggaggcaggctcggcggaagcgtgaggttcggcagaatcgtggaactcgtcggcgtcgaaggaatggggtgcaacggtcatgaaacagcaatccgtaactgataggcgaaaacgcagaatcccggcccgtgccgggattctgcgttctggttctttgagtggtctttgagtggtcgttagtcgtggcgggcatcggcccgtctcaggccagtcactgctgcttggacagcaggttggagatcggcttgtagatcaggaaggtgatcacggcgtgaatcgccatcttagccacgttgaacggcagcagaatcggcagaatcatcgcggccacagcttggtaggtcatgtgcgcgtaaatcggcgtgacaatcaggttgctcaccagcgccaccacgatggccagcaccgcacccaccagaatgccgatggcggcacccttgcgcgtacggatcttacggtagatgaacgcggccggcacagacaggaacagcgccaccagcacagccatcagcgaaccccacggattggcgaacatgtgcggcacaaagccgagcacagacacgattgcggcggcggccgggccatacgcaaagccggcaatcaggcagacgatgccggacgggtcgtacttcagccaagtgaccggcgtaatcgggaattcaatgaagctggtgaccatcgccagcgccacgaacagtgcatacatggcgatacggcgcgtggaccagcggccagaatcggccacaccagtggtgtgtgagccaagtttggcgctggtgctggcggtggacgtgctggccgaaccctcggcctcgggtgccacagaacgaacaacttgcatgcgaatacgcgaagatacactcataatgagccctcgtttcttccatccggactataccgttggctccggaatctcaccggatcagccgcttgcgcgggtcgcgggcttcctgccatccccgttatgaaacccggggtgcaggttaccgccagtaaggaattgcaccttccctgaaactgacaggcttattcatacgccatgcgccggacgtatgcaacccgcgtttcactgtgcagaaattcgtcttgtgccggtcaagtgcaacaatgggagccatggctgaagtgaagaaacccaacaacaccatcgacaagcttgccctgatcgtcaccacctacaaacgtcagcagttgcttgagacactgttcgattcgattctggcgcttgaacaggcaccgtggcgcattgtcatcgtggacaatgagcagtccgatcagacggcggacatggtcgctgcgtttgccggcaaggtgaccggccaatggggcaccaccgtggccgaccagtccggtaacgaagaacgtgtggtctatgcgccgcagaccgagaacctgggtggtgcgggcggtttctccgtcggcgtggccaaagcctacgagctgggtgccgcatggttctgggtgatggatgacgatgtggccgtgctgccggacgccattgccaagctgtccaagtggaccgacaagcacgaggtgattcagggctcccgattcgactacgatggcggcccgttctactggcagtacgacttcattgtgccgctgggcatcccgaacccgattgcgcccgccgcattcggcccggccggataccgagtgatggacacgctgtgcttcgaaggcggcctgttcaaccgccgtgtggttacggaaatcggtctgccggacccgcgcttcttcatctactgggatgacacgatgtatggctaccgcgccagcaaggtcaccaacccgattgtggtgcccgacgtgatcctgcgccgtacgcgcgaaatcggcaattgggatatcgccggcgtgcgccagctcaactccacatccgacatgaaccggtatcacatcatgcgcaaccgcggatacatggcccggtacttcatgacctatggtgacttccgtccgctggtgtttggactgggtaccgtgctcaccgcggccaaggaagtcattcgcctggtgatggtggatcgcgagcacctcaagaccggtttggtacagattgccaagggctggtgggactcgcgcaagctgatgcacgaccccacctggaagctcatgccgtcgctgaagtagccgtagtagtggctcccctctatgagggggggcactacaggttacttatggatgaacaggccaccgtcgccccaagcccactggccttggccggcaccgatctggaagtgcagcttggcgatgcccatgtcattgaacgcgtgatgctcatcttccgcactctgatcgatatgcgcggcggcggtatcgtcggccggattatacgagaaggtgattggctgacggttcatcgcgctcggcgccttcatcgcagcctcgacgccggacttgaaccaatccggagcggcctcgcgcccctcatcgctcattgtggcggtgaactgctcataggtcttggtggcgcggtgcgtgcgttgcgcttcgcatagctcctcataggatttcgcctgataatccagatgattcttcggatgcccgatcaccacaccgagatacagctcctggccagaggtgacgcggcaatgcttggccgcctccgccttgtcccatgagccggcgacccataaggtgccgaggccgcgcaacgtggccgtgagcaccatgcgttcggcatagaagccggcacgctctttggcttcctcatcgttcgcggggccgacgatggccagataattcgccgcattggtcagatgacctgaagcattggcttcggcgaacaccttgggctggtcgcgcaccagctgaatgttgagatcgccgagtaagttgatcggctgaagcgccatctcgagctggcgggccgtatcgtcgtcgatcggctcatcatcgtaggcgcgtacggcggtgcggatgttaattgcatcaataagttgggtatgttctgccatacctcccattatcgcgcgcgacatagagtcaggccaccatagacgccgatttttcctagtatgcgaaatcgcatgcattgccattgtcaggcttgaaaaacgatacgaatagggtacgtagtgaccggcgacgatgcacacgtttgcacaattggtgtgtaatggtttcgtgttgagcgtaattcgcgttaaactgggcgcaaccttacgaactgatgaaaacgtatggaaaggaaggtcaacgatgattgaaactgcacaggctttcggtgttgacattggcggttccggcatcaaggccgcacctgtcgatctgaccaagggcgatttcgccgagccacgattgaagattctcactcccgaggtctccactcctcaggccgtggccaaaatcgtcaagcagcagctcgaccacttcgaagtgcctgaatccgcacccgttggcatcgctttccccgcgccgatcaagcccggccagaagctcgacttcatggccaaccttgaccagtcttggattggcgtggacgttactgaagtgttctccgaagcctgcggccgcccggtcgtcgtggtaaacgacgccgacgccgccggcctggccgaagtccagttcggtgccgccaagggccaggatggtctggtcatcgccaccacactgggcaccggcatcggcaccgccttgatttacaacggcgtgctcatcccgaacaccgaactcggacacatcatcctgagcgccaagcatctggacgccgagaagtatgcctcctccgcgattcgcgagaatgaggaactgggctacaagaagtgggccaagcgtctgaccaagtactacggccttatggagaagtacttcaacccggacctgttcaccgtcggcggcggcgtgagccgtcagagcgaaaagttcctgccgtacgtggatatcaagaccccgatcgtgcccgccaagctgcgtaaccaggccggcatcgtcggtgccgcctactatgccagcaccaagcagcagtgagccagtgagcgtgggtgtgcagcgctgacccgcgaatatgcttcaggccgtccgactagtcgggcggccttttgcattgcataggaaaggtatgcgacgcgttcccgggaatgttgcgcaaagtgggcgtgtgtatggaggtctgtggcgacgcgttcccgggaatgtgtcgcgtttgagggcggggcagggggcaccacgctctatcgtgggagggtatgagcgtgcatttctcttctcgtgtggatatttctgcgccgaatcccattgcggcggccgcggcggcagccaaggcaaacggcatcgcactcagcaaactcaacgattccaatccgacccgccacgggctggcacctgaattggtgccgagcgtgtatacggccgacccgcgtggaccgcgtgcggcgcgagaagcattggccgcattcctcaatacggcaaaggcggtagacgcaagcagccctcagtcgacttcgcccgccgccagcgagggcgggaacgagcgccatgccgctttcaacaatgcgaataccgccatcgagggcgttgacccggacgccctgtacttgctgagctccacgtccgaggcgtattcgtggctgattaagttactttgcgatgccggcgacgcggtgctggcacccaaacccggctatccgctgattgagtcgattgcacggcttgaatgcgttgacacggtcgaataccagttgcaattcgacggctcctggttcatcgacatcgccgaactcgagcggctgctcagcgagcccggtggcgaacgcatcagagcattggtgctcatcaacccgaacaatccgaccggttcgtacgtaaaaccaaccgagcgtgcacgtatcgtgacattgtgccgtgagcatggcatcgcccttatcgccgatgaagtgttcttcgattactctctcgaacctttccccggcaacgcacggctcgcgggggagcgcggcgtgctcaccttcgccctagacggattctccaaaatgctggccgcgccgcacgccaaagtcgggtggattcaggtgtccggacctgccgaggacgttgccgaggcacagcgtcgactggacgtcatcgccgatgattatctgccgatgagtgacatcatcgccgaacggattcccgcattattgaacgccgcgcccgcacagaccagacgggtgggggagcgcgtgcgcaataacctggccaagttgcacgagttgcttgacgccgatcccaacgggctggtcagcgtgctacgggccgaaggcggctggaacgtgctgctacgagtgccttcagtcatcgatgagaacgagctggtgctgcggttgattgacgagcacaaactgaccggacagcccggctacttcttcgacatgacttccaatggatacctggccgtttccctgctacccgaaccggacgaattcgagcgtggcatccgcgccgtgctcaataccgtcgccgctttgctgcgataggccggtgtttgccggcaccacgcctgtactccacgtacaatagcggcatgggattcttgtttagaccgaaagaactgccacgcccggcgtcgctgacgttcactttggatcaggccgggcatacgtatgatgatgggcacgtgggacttgctcccacggacatcaccatcagcgagctgcgggtggctgtgatcggactgaacggcgcaggcaaatccacattgctgggtctgctggacggttcgttgaaggccaacgccggcacggtgaccattgcgggcggtgaggaacgtcttgacccggctgtgaagaaggacgcgaagcgcatcgataatctggtcggcaaagttcgccgcgaggagattccgaacagcttttaccaagcggcgaatatttccgaggctgtttccgaagcgctgaaaaagcacaaggtgcccgagtcagaacgtcatgcgcgcatcggcaatctgttcgcgcattttgatttggcgcaggtctccaaggccaaggccagcgaactggactccgagaaacggcacctgctggctattgcggccgcgctgagctttgagccgagtgcgattgtggcggatgagccgagcaagggattggatgagattggcgccgcgcatgtggccaaggcgttgttcagctacaacaagcaggtgattttcgccacgcatgacacggatatgatccgccggcccgaatacgccatcgaccgcgtactggtgctggacgagcacgcggtcgcgtttgacggagcgccggctgaggctgtggcgttttatgaggatctgattcgccgccgatacgagactagagcatcgtgaaccatgcctgaacctgatgccagagcgtcggattgttgtcgatcatcgcatcgctgcgcgactgcacgaagcagctcagtatggctatgcccagcgcccacaatacggccagcatcacgacccagcgcatcagccaacgccacggagtgacgcgggcgatgccatcgcctgaagcggcgtcgttggcccccgccaatgaccggctcggttcgcgcccattgaccagccacagtagccccggtatggacgccagcgagatcagccagccgaaatcggcggaataccgccatcccaaaccgccgacgcggctgtcgaatacgaccagcaccgccgccacggccaagcaagacatcagccatggccgcatgccgtgtgtttctaatctgcgcagcaggggcagcgccaaagccatcaaggtcagtggcgtggccgtgaaaatcgcgccgaccatcacctcgtaataaccccattgcggcatcggggcgggagagcccgccagccacgggaaacgatccatgaagcgcagcggcaggaacaggtaataccagatgttggcgggcatatccgcggacggggtggtataccgggtcatatcggatatggagaactgatacgcattgccgaaattgaacggggaatcgaaccgaaccatgttccacgccatcagaggcgtcacgacgagaatggcgggaatgattaccgccagcggcgcgcgcaacgcctgcaacggcttgatgcggcgtgtgcgcagaccggtgcccagcgcgcgaatctgcggccagaacagggggaacgcaagcaatgcggccaaggtgaacgtcggtcggcatccgaaattcgccgcaatgcacaaggcgcccaaggccagtcgtggcagggagagaggcttggcatcgcccgcctgccatcggtccgatggtctcagcggacggcgggacgtgtccgcgccgagccatagccatagtcccagcgacgtcaacgtcagcgatgcggcgaacggtatctgatagaagttcgtgcgatacagcaaataccccacttgcgcgctcaccaacgatgagaccactactaacgacgcggccgccaccgaagtcttcggcatcacacgatggatgacgcgcagcaccagcaaggagaagaagatgatgaacagcagcacgagaatatactcggcggcggatgtcggcagattatgaccggccagcagacgataggggacgaacagcagcactgcgggcaacacgccaaaataggaataccagtgaccgtcataatacgcgtaatcccagtagagcggactggctccattggcgagtagctgggcacgtgtggctacgtcataggggtgctcggtggcggccagttgttcgggaaccggcaagtcgagccagggccggccggcgaccagcgcatcggccacatgcccatactggtcgaaatcataggtgtaatcgccggaaacgtggaagacgagcgaagacgcgtaccacagttcgtggatgatggatacgccgataagcagggtaggaatcgccagaagccccacgaaagcaagtcgttgccgagtgctggacgggtcaagcgtgatacgccacaggcgcgatcccggcctccagacggcaatcatcagcaacaccaaggccatggcgagcacgcgcatccaattgatgacgaacggtacgcgcacgttggcgcgggcgtcggtgaccggtacgatcgcgccgcgctcttcctgaatccaaatacgcacgatgccggcacccggcgccttgacataatggctgcgaatagcgtcgggattcatcgactgggccttgccggtgatgccatcgacatccgcgcgcacatgaatggtcgccagcggtttgaagacttccttatcgtcgttcgctttggattcggcctcggcctgctcgcgggccttatcgatgacctcgctgctctcggtatcgatgcgtaggtaatccgacgtgccgtccgcggtcagttcaagataggccttggtcggatcggtgacggtcaacatgccatcattccggcgcgtgagacccgaacccagcgtgttatgcacggcgttcgtatccgtgctcgctccgagcgtacgccagaacggcaggttgaacacgatgcactccatggcggcgatggcggcgacggcggccagcaaggcgatcagcaggcgcaccaaacgcagccggtgccgggtatccgggcggctgggcaggtgccgttcatgattcgacggcatcggacggtctgcgcgagtgtggtctatggaatgcacgcatttattctataggctttattcgggcttgatgtcgggcaaacaagagacaatgtgaatcatgccaaaacgtacatcggaccatgggaagcacaaccgcacgccactgctgggcgggctgaaggattcgatgaacgcgctcgcggccgatctgggactatccaagccgaagaagcacgatacgaatccgttcggcgatgccttgcaggagaccagtgagcgtaaaggcggcattatcgacgaactgactcgccatgcagtggcgctgagtcctgtaatcaagcgacgcaccttccccgaattggagaacgtgccggaagggctggtgcttggatgggcgcagctgccctccaccagaggccgcggcttctcgcttggcattttccccgaccgcgatcattttgcgcaggtggcgttcgccgatacgcatggccgcgtattcgtgggcaccgaccccgacatggacgtgcaggatatgcaggcgcgatttatgttcggcaaggaaaaagaagtgacattgccggacggtgagcggctgggcgaaagcgacgagcctcgttcacgttccggtttctcccgtacagaccgtggcctgggaagtgcgctgcatcatgggcgtggtttggggcgtggccttggtcatggtgctgacggtgtgaaggccattaccggtggcgtggtggggcgtgacgacaccggacgcatgacgtggctcgcctcatggctcaaggccggcaaccggtacacgcttgagcagatgcgtgccaatctgccgcctgcgatgcgtcatgatttggaataccgcgatgccattaccatcgcgttcttcgccacgtatatgttgccgcagatcaatggtctgctcatcggattcggttccggcaatatcttccgccgtctcaaccgtgaggcgccaatcggtgcgattcgccgttcggtgcgtgacactttggcggcacgagcccacggcatgcgggcctccggtctggaggatcacttcgccgatctgatgcgcgaagccggcgccctcgacaccacgccgggactggaagcggtgcatggcgccgaaccgttgcacctgtacacctcgacgtattcgagcggctatttctttacgtgggataagtccttggcattcgggcaggcgctgaaatccttgaagatcgaaggcaacctcaaccgattcgctgcggtgagcgcttggctggagcgcaacgcttccttggggcgcaaccctacggaagatacggtgacccgtgccgaggccgcgcaaatcgacatgaaactcattgagaaccctgcgattatggcgcttgacccgtatgatggcgagcaggagcgtcgggccgtgctgagcctggtcgatatcgccgcacgcacggctgggcagattcgcagtgaattccctgatcctcgagatgtgctgacccagcagaacgtgccggattcgggtgtgacgaatgctgcgggcgctgaaagtactgagagtgttgagggcgctgtagagcggaccaataagagcgacaccaacactcaagccgctcgtccttcgtattcgccggcgaggagcgacgaatgggtgtatcgtcagaccctctcttcactgttgcgccggttacggttgccgtatcggtttgacgtggagttccggtcgcgcttggattcgggtgaagtggccattggcttcaccaccgccggcacctcgatgatgcccgatagccggtatgacaccactcgacgtacgtggcgtgcgctgagtagcgccgaacgcgcgtcaatgagcgccgcctacaacctgcgtgtcggcctgatgatggccgcgctaagtttcggcaccagcgaatccgtgcgccaggtgtcgttgcacatcgattccattggtcttgaagaggcgattgccgaacaggattccgccatcgaggcgatgatgagcgaggccctaagcgccttcgaacatctacgcagtggcgatttggggcgtgtgggttccaaagccgaccccaaagatggtgatttccatggcgacccgacccgccccatcacccatgaggagacgttcgggcagacggcgtccggtgacgaacgcggcacggccgggggagcaggcaacggtaccggaccgtctgcggatgctacggatcaggccgcggccgaatccgctgacgccgatggcgctgcgtccatcgattcgcagttcgaagacctgatgaagggcatcgatatcgacgaaatggcgttcggcatgccggacgatactggcgcaggcgacgacctgggcggtatcggcggcgagggcgtcggcactgacggtgctgatggggccgccggcatggacgatgatccgatgagcgtgctgcgccgcaatcccaccgtgcgcaatatggtcaccgtcaccttcacccgtgatgccttcctcaagcgactggacaccgctgggcttgacaatcccgaggaaacctaccgcatgttcggtgccgtgatggacgtggacggcgaaggtggtctgaaacccatcagcgccgacttcgacttggcggacagccggttctctcccaccggatcccaggaggagcccgaactggccgaccgtcaattcagcccggcgaccgctcacgtgctgggcgcacagaatagtgccggactggctatccagcgagtggacctgctgcagcatggcgtcaacgaattccacgatatcgccaggaacacgtcgctcggctccgtggaaaaggcccagcgagccatgcaggtcatcgaatcgatatgcgatcccgaactgaccgatttggcctctcaggtcaccagtgcgttgatcgatggcaaggacacgccggacttcacgttcacgcttgccgacgatcttgacaaggagcgtctgcgcgcccgagacatgctgttctcgggccaagccgatcaggccatcgaagcggccgaagcggccgtggcccatttggaccaggtgtatgcggcaggccatggcgtacctcgatacttcaactcctatgccgagcgcgtggtctacaaccggctgttcgccacattggacgagcgtacggtgcttatcccggacaatctgttctacgcgcacatggagctggctgacgtgttgagtcagatcaagggtgccgaggcggccatcccgcatctcaaccgtatggtggcgtacgcgcccgcctacccgctctcacatctgaagctcgccattcaactggcccgcaatgaggattgggattcggcacgcgccgcctgcctgaatgctctgcgcgtggccttggaccgcgacgatgccgcgttcgcctattaccggttcgcgtacgccgaatggatgcttgaccggttcgacacagccgccgcagcctacattatgagcgatcacatcgctcccggggccattggttcgctggaaagcgaactgcaggaactggtttcccgtgcggactcgcagtgcataccggtgcctgaatcggtggaggccgccgcccatgtgcttgccacgcatgatctgccggtctggccgcatatcgaagtggctgacatcgtgcgtgacgccgctcgcgtgtgcgtggatgagggcatgttcgtgccggcccgcacgctctcggtggctgtggcccgcatgaatgacggcgaaggcgataacatcgacatcatccaagcccagttcctgcgctcgctatccgcgtagccgcctgaggggagttgacggtatagccggccgaggggagccgagcccgctaggatagacaaccatgagcacgaacgaacaactggcatgggatttcgacgatggggatgtggccgaggtccggcctgataccggtattgcacgttttgcccctggctccgaacaatggatagccgcactgcagcccactgacgacgacgcgatacgcctcgaccgtttcgacgtgaacacgatgaccgctgaggccgccgcccgcctgtgggctcgcgtggccgcatgggtggaatccgatcagatcgcctactacatcgacgactcacccgtcagctccgacgccgcctacgacgcgcgcatgcgttgcctcgaacgactcgaagcggcgttcccctcactggacaatccgcagtcgcccacccatcgcgtcggcggttccttctccaacgacttcgcctccgtgcgccaccccagccgcatgatgagccttgacgacgtcttctccatcgaagaactcaaggattggtacgactcggtgattcgcgacctcgattggcccgaatccaagcccctgcccatgagctgcgaggtcaaaatcgacggcctcgccctgaacctcatctatcgcaacggcgtgcttgaacagggcctgacgcgcggcgatggcgttaccggcgaagacatcaccctgaatgtgcgaaccatcggctccattcccgcaaacctcggcggccccaaggaagacgttccggacttcgtggaaatccgaggcgaagtgttcatgcgctgggatgatttccacaccctgaacaacgagcaggaggacgccggacgagcgcccttcgccaacccacgcaacgcggctgccggctcgctgcgtcaaaaagaccctcgcatcaccgccacccgtcgcctgagcttctatgcgcatggtctggggcagctcacttgggggccggaccatccgcgcggcacccatgacgtggtcgccgaccagtcgcaggcctacgatctatacaccaagtggggcgtgccggtctccccgcacaatcgtgcggtgacctcattccaggagatcctggacatgatcgagtactacggcgagcatcgtggcgacatcgagcatgcacttgacggcatcgtcgtcaaggtcgatgacctgggcctgcagcgtaccctcggcgccacttcgcgcgcgccgcgctgggccatcgcctacaaatacccgcccgaagaggtcaacaccgaactgctcaacatcaccgtgcaggtggggcgtaccggccgtgtgacgccggtcgccgtgctcaaacctgtctacgtggccggctccaccgtggctcgtaccacgctgcacaatggatttgaagtcaaacgcaagggcattctgatcggcgacaccgtggtggtgcgcaaggccggcgatgtgattcccgaactggtcggcccggtgcttgaacggcgcaaagggcgtgaggaccagctgcgcgaattcgtcatgcccgagttctgcccttcatgcggcgcgaaactgtcacccgccaaggagggggacaaggacattcgctgcccgaatgtggagagctgcccggcccagttgaccgagcgcgtgatttcgctggcctcacgcaaggcgttcgacatcgagcacttgggcgaacaatcggccatcgctctgaccaacccggaggagaaccggcctgattcggtggcgacctacgcgccgaacatcaccgaggttctggtcgcccccggcgaagagcctgacccgtacgagccggtggaagggctggaattgccggccgcgcagaagccggtgttgtccaacgaatccgggttgttcaacctgaccgccgccgatctgcgcgacgtgcgcgtgtggcgtgaggccgcaatcgtcgaggtgcatgagacggtcggtgcgaacggtaagaagaaaaaggtgcgtaagcgtgtcggcggctctggcctgtggcatcaggtgcctgccttctggaccgcgcccacgccggccaaaaagctcacggccaagcagctggccgaacgcgcgcaaggggaggccgcaatcgaatctgccgaaacacagggagataccgccagcgagacgaccggcgcacctaccggggctgaggctccacttggtactatgccgggctttgccgcagcctcctatcctgagtatgacgtgccggccgacgcggttatcgtgcgcgtggatcacaagaccacgcgcactggcgtcacggatgtaccggtgatcattcggcccggcgaaaacacgcgcaagatgttcgacgaaatggacaaggcccgtcacgccgacctgtggcgtgtgctggtcgcgttgtcgattcgccggctcggtccgcctaccgcacgcctgattgcctcggcgatgggctcgctggcagccatcgaaaacgccacgattgaagatctgacggccatcgacggggtgggcccggaaatcgccgaatcggtggtgaactggttcgccgccacccgcgaacccggcgactggcgcggcgcgactttgcgtgcttggcaggccgccggcgtgggcgtcgacgaggccgagaccagttcgttgccgcagacgctggccggcaaaaccgtggtggtcaccggttcattggagggctattcgcgtgattccgccaaagaggcgattatcgagcgcggcggcaaggcggccggttcggtgagcaagaagaccgattacgtggtgattggcgcaaacgccggctccaaggccgccaaggccgaggaactcggcatccccatgctgagcgaaacccaattcgcccagctcctagccaccggcaccatctaaaatagccccctcagacgcttcattaaccccctctgatgagggggctgtcagcctttaggctgactgggggagagaaaaagcgaatcccgccccagtgtgacttactccactccctctggcatgccgccgcatcacacgctagggtagaacaggccctaaaggaggatacggatttatgagcgacgcacgtcagatcgaagccgacatctacgaacgcctgagcaaggtcatcgaccccgagctcggtcgttcggtcaccgacctcggcatgattgccgccatcgaagccgcgcccgcatcgtcggacgccggcacttacgacgtcaccgtgcacgttgagctgacggttcccggatgcccactgagcgagaccatcaccagccagatcaatggcgcggtcagctcctatccgggcgcacagctgctgcctcatatcgaagtcggttcgatgagccgtgacaagctggccgatctggtcgccgacctcaaggccgaacgcaagcagaaccccttcagcaaaccgggtgtcaagacccgcatcttcgccatcgcctccggtaagggcggcgtcggcaagtcctcggttaccgcgaacctggccgccacgtttgcggccctcggcttcgacacggccgccatcgacgcggacatttatggcttctcactgccgcgcctgttcggcgtgcatacacagcccaccaatctgaatggcatgctcatgccggtcaccgcgtggggcgtgaaactgatctccatcggcatgttcgccggtgctgaccgggcgattctgtggcgtgggccgcgactgcagcgctccttggaacagttcctgtctgacgtatggtggggcgagccggacgtcctcttgctcgacttggctcccggcaccggcgacatggcgatttccgtggcccaggcgctgcccaacgccgaactcgtggtggtcaccaccccgcagccctccgcttctgacatcgccgtgcgctccggactcgtggccctgcaggtgccgatgaaggtgcgtggcgtggtggagaacatgagctactacgagcacaagggcgagaagctggagattttcggtgccggcggcggtcagcgcgtgtctgaacagctcactcaggcgctgggctatgacgtgccgctgatggcccagctgccgctggaacccgaagtgcgcgagaccggcgaggccggccggccggcggtgctggacgccgacggcgctttgcgtacggatggcattggccagaccttccgagggttggctgaacggctgttggcagtgtgagcctgcgcagcctcacacttttgtaggcggcgttggcgtttaagtccggttcgctgctggtgggcgaatcgcttgaccacagcacccgcgacctggtggtcgaggcaatggagcgcactgtcggcgtggataggctcattaacctgcaggccattcacatggacgaggacgccgtgccgcgctgccttggtatgaatgggagatctacgttgagcccgatatctggcgggtgcctcgcagtaaataacggcatagcgcattgtcggtgcgatgctaagaggtaatggcccatgagcggttccaatcggcgagattgcgttgccgggacaccacgacatgggccatctcgataaaacgatgccgcgtgtcggctgttctcaggtcatccgcagtgacgagaatgacgatccagccgagcagttgcaatgcgtttcgctttgccgcgtcgattcgcatttgtgccggatcggcgtgataggctccctgatattcgaacgcgacgcggcagtccggatatgccatatccaatatgacgtatgagttgccgatattcacgcgatagttggcggtggggcatcccaagcctgaatccttcagcatcccaaacagcgtgttttccggcggagaatccgtgttctctgtcatgtagggcagtgcctcgtggcatttgttacgacctatgaaccgcggactgatttccaagtaagtatcgaaatccttgcgagtggccattctgcgccgtttatcgcggctcatcaaagaggctccaatggccgcaagttcctccaatgtagagtattgggccatctgagcccacatcatgaccggcgaggcaatccagaactgttcataatcctttttgcggatatccagttttcccttaaacacatggaagaccacgcctttgattcgtctgcgtttgttggcactggaaacacaggcgtgcacggcatcaacagatagcgtgcaatgtcgggggatgggcgcgccgtagtagttggccgcattgatgtatcccaccagcaatggacctttcgaacggcgcgcagcatcattgcagcgttcacgttctgctcggcgtcggccgacaatatcctcatgcataaaagagctcatggtgcgaccgtaaagctgatttggacttgaatgcaagccaggcagggcaatgtggttccagcttatggagttatccacattgtctatttgcgcagagaacggttctcagtagtatctgtgcgctcaaatgaacaagaacataacaatctcacatcatcgcaaatggcgacatggcagtgattagggcatattccatgtgtgcttcgggcgtagagaagtgtgcacagacattattgagaaccgttctctgcgcgcctatctggctacgacctcggtgggcaggagccccgtgcgctggaacggccggtcctcgatctggtcaagcactagggtagccaagctgacgccgaatgcgtccattggctggcgcacggtggtcagctgcgggcacgctggcgtcggcgtcgacgtcggcaagtacgacggtccgatgatataggcgattcgtcgatacccgcgccccaacatatgctcggtgagcttgcgtgaagcgagtcggttgtcgatgtcgacggtggggaaggggtggcgctgccatagccgacgccggaaatggcgactggcacgctgatattggcgaatccctgaaatagagggtcgtccttatgaaatgtgttgagaatccacgggccgtatcgcatggcgcagcgcagtctgcaccgccccgccgccgaaccaaccccggcaagatcgcgcgccgcgccggcaccactatcctcgccctgctgttctgcgtcgtatggttcttcccggtctactggatgattatcaccgccgtaaagccgcgcgatgagatcatgaccacgacccccgtgttctggcccatgcacctctcgatcgtcctgtcgattattgtcgcgttcttcgcgtgcacggccctgaccctgtaccgcttccgcgggcgcaagccgatcatggtgttcgtgctggccatccagatgacctctggcggcatcatcccgcagatcatcatctacaaccagctcggcctgctcaacaaatacagcggcctgatcctggcgtacatcgccatggtgctgccgttcgcgatctggaacatgcgcgggttcttcctgaacatcccgaaggacatcttcgaatccgcggccgtggaaggcgcgaacgactggcagatcctgtggaagatcaccttcccgctggccgcgcccggcatcgtctcgacctcggtgttcgcgttcatcaacgcctggaacgactacatgatcgcccatacgttcatgaaggaccagtcgaagtacacgctgccggtatggctgtcgtccttctcgacacccaccatgggcaccgatttcggcgggcagatggccgcttcggtgaccttctcgttgccggtggtggtgttcttcatgctcatccagcgcaacatcatgaagggtgtgacgaccggtgccgtgaaatagcgtatgccgccgtacctcaccaaacgattcgtccgctgatggcggcgtgaccgcgtgtcgcctgccgtcagcggatgaacgataataaaaacagtatgaaaggaacagctgtgcccacattcgaatataaggctgatgccgcaacgccgtgtctcaccctgattcccgctccggtgacattggaatacacgcatggcacggctatgatcgggtccttggtgacgatcgagaaacgaattcccgaatatgccgtcaccgaagatgccgatgagacctgggaaacgctgccaatcgagcagctgtccagcgaactcgagcgttactgcggcgtcgccgtccgtacgcgccgagtactcacagccacagatgaagccgacgccggtgccaatgccgccgaaaaagcgcgagatgcgggcgtgggtgcgggtgcgggcgcgggtgcgccggcagcgatgaacggcaccgtcatattgctgtgtgtggatgcgcgattggcgcatgacgaatacacgctggatgtgttcgcctcagataccatcgccgtgcgtggtggcagcgaaagcggattgcggtacggcatgcagacactgcggcagatgatcaggcaaacctcgcggaccttgccctgcctgcatatccaagacaagcctgcgttcgcggtgcgcgcctacagtcttgacgtgacgcgcgggcgtgtgccgacgatggcgttcctcacctggttcatcgaccagctggcgttgtataagtacaaccaattccagctgtacgtggaacatgccttcgctttcggcgagctcagcgaagcgtggcgcggcactgacccgctcacggccgacgacatcatgttcctggacgaatactgcgcacaccacggcatcgaactggtgccgtccttggccactttcgggcacatgtatatgaacctgcgcacccgtgaacatcgtggactgggagagttccccgaagacgccgaccgtccgttcagtttcatcgaacgaatggaacaccacacactgaacgcagccaaccccaagtcgcacgatttcgcctcgcgcctaatcgaggaatacgcgccgctgttccgctcgcggtccttcaatattggtggcgatgagactttcgacttgggccgtggccggtccgtacaggactcgccgggcgccagtcgcgatgagctgtatgccgatttcgtcaaagacctatgcagcacgcttgcccatcgtggtctacaaccgatgctgtgggcggatatcgcgctcgagaatccgcacaccatggacttgctgcccggcgacatcacgatgctcaactggatgtatgagccggatatcgacgaaagcaagatccagaccatcgcatcacaaggccgccgccaattcgtgtgccctgccgtgcgtgcgtggagccggttcttccccgactatgacggtgcctggctgaacacgtaccgcatggcggtggctgggctcaaatatggtgcggaaggcatggtggtcaccgattggggtgactatgggcatgtcaatgatccgcggttgagcgtgccgggactgtgctacggtgcgcaaaacgcgtggaacccggttgcaattgacgcatgcgaaatgaaccatcggatttctaatctggcgtatggcgacgaatccggttggcttatggattcactcgctcgcatcgactccgatggagtgtcgttcccctgggacctcgccgtgcaagtgctggaactggaatacggttccggcaccggcatgctgaatacggatgtggcatcgtgtgtggaacggtcgtgcgggggagagctcgtgtttgaccgtacgctgggatgcgccgatgcgcgccgccggctgctcctgcggaaccatgcccgactcgaacgacgccgggattgcgaccgggcgttgatcgattgcggcagtgcggttgttgcggtgctcgatggctcggcacgaggaggattgaacccggaactgctgtgggtgatgctggatgggcagcggttgttcaatagactgggcgaggaactgctggtactggctggcggcgaggacgcctgtgacaccaaggatgtgaccggccgtgcgctggatgcctcgcgccgcgcccgtcttgccgccgatctggagttgtggttcgaacggtaccgtgtgcagtggctgtccatcggccgctacgccgaattggcgcgtatcgcccatgtggtgtggtcgtttgcggacatattgcgtaggggagcgctatagggagctcacagaaattcggtcctgctgagaacaaggtgaggcttacgcgccgtcaaacgcacatggtgatttcaaaaaatggcgaattgctgccattcttgcacctgtgcgtttgatgggaaatgtgcgtatgcctcacattttttgcataaagcatgaaaatgtggcccgttgtctatttgaaagtgcgacaccctttagattggagattgtccagataaccagtgaaggggtgtcgcgccttgggtcaagtgtattcgcacctgtcggaagaggaacggcggatcatccggatagagatcggcaacgggacgagcatacggcggatcgccggcctgatcggcagacgcgcctccacggtcagccgcggaatcaaacgcaacacatggttcccgtccaacgagaacgaatcctaccggccgtaccggccggagcgtctcaagacggggccgtggaccggccggtgccacatcgccggccccgcgcgccggaaggccggacgccgccgcgccgggaccggcgtcacgcacgacaacggcgccgagttcgcccgccacgcggaactgcgcgaacggctcggcatggccgcctacttcgccgccccgtacccgtagtgccggcgcggcggcaacgagaaccgcaacggcgcgatccgccgctacctgcccgaacgcacgcgcatcgacccgtccatggccgacgagatacaggccatcgtggacgagaccgacaaccgtcccatgcgcgtgctcggctaccgcaccccggccgaggcattcgccgacgaactgctatcattaaccgaacaacaaggatgttgcacttctaaatagacaacgggcttttgtgctgatatagggatttgtgctagtcgaatccgcgaaatgttcagtaaatgttcacgtagcgaaatcggcatagaatgcgagcaaacgcataacggcacggtgctgttcctgcgtacgccaacgccaggcgaaccgccggaaagaaggggtctccatgattgagacagcggacgatatcaagacgattgcgaacgtcggcacgggaacaatgggccatgcgatcacgttgcagttcgcgctggccggatatccggtgcatctggtcggccgcagcgaggcctcgctggagaaggcgatgaaggcgatccgttctgatgccgaggacttcgccgaagccggactgctcaaggccggcgacaccgtggacacggtgctggcccgcatcaccggttacgccgactatgcgagcggcgtggcggacgtggacttcgtcatcgaatccgtggccgagaaccttgacgtcaagaagtccgtctggaccgaagtggagcacgccgcccccaaggacgcgattctgtccacgaacacctccggcctgagccccaccgcgctgcagtcggtgatggggcaccccgagcgcttcgtggtggcgcacttctggaaccccgcgcagttgatgccgctggtcgaagtggtgccgggtgaaaagaccgatccgaaggtggtggacatcaccttcgacctcatggccaagatcggcaagaagccggcaaagatcaagaaggaatcgctgggctttgtgggcaaccgcctgcagctggccgtgttgcgcgaggcgttctacatcgtccagcagggcatagcggacgcggccaccgtggacgacgtgatgaagtacagcctcggccgccgctggaacctggtcggcccgatcgccagcatcgatctcggcggactcgacgtgttctacaacatcagcacctacctgttcgacgacatggacaacggcaccggcccgagcccgctgctcgccgaaaaggtcaaggaaggcaacctcggtgccaagaccggtcagggcttcttctcttggcagggcgaggacggcaagcgcatcatcgaaacccgcaacaaggccctgctgcgtgcgctgaaggacgatgccgcggaagcgtaaagcgcgagcgacgaattctcgcgtaacgtgtgctacgatggaaggcccccttcggggagccttcgttgtgcttgcgttgttcttcggtccaacttttcgacatgcgtatacgttgttgatagcgacaattgcggaaaacgcttacagtatgatgtgcacacggacaacaagccgatgattgcaaggagcggtgacgacgatgacatccacagaacacaatacgcgagccgacatgttggcccacatgggcagccttcagcaggccgcctacgtgcgcccgatcgagtaccaggagggccgtgcccacggcctcaaggccatcgaggtgaagaacggcccgctacgcttcgtatccatggccgaccgcgccctcgacgtctgccagttcgaataccgcggcgagaacctcaccttcctgtccaagccgggcctgaacggccgcaaccagttcgacaccaacgggctggaggcgcagcgctccatcatgggcggcctgttcttcacctgcggcttcgagaacatctgcgcgccgtacgtcacgactgagggcggcaagtacccggccggcagcttcccgatgcacggccgcatccgcaccacgccggccgagcatgtgggctccgacgcccactggaccgccgaaggcgactacgtgctcgaggtctccggcgaaatgcgcgaggccgaactgttcggcgagaatctggtgatgcgccgcaagatcaccagcgtgtacggccagccgtcgatcatggtcgaggatgaggtgaccaacgaatccttccgcgacgagccgctgatgtggatgtaccactgcaacttcggctggccgttgctcgccgaaggcgccgaagtcgtgatccccagccgcaaggccaccccgcgtgacgagaccaccgcagccgacaccacgccgtggaacgaaatccaagcacccgaggcgaaccgccccgaaagcgtgtacctgcacgagctcgccgccgacgagaacggccgcagcttcgccgccgtggtcaaccgcaagctcggacttggagtcgtcatcgacttcgacgccagcctcttcccatacttcatggaatggaagtcgatgggtgcgggcgactacgtggtcggcctcgaaccctcgaactccagcgtccacggccgcggctggcacgagcagcgcggcgacctgcacaccatcgccccgcagaccagcgaacgtaagtccctgaccttcaccgtcatcgaaggcgaggccgcgattgacgggctcatcgcccgccgcgacgccctgcttggctgaattgtgagataatatcggccgatatgtgaacggctgattagcgtggggagcatggttacccgggattcggaacagtatctgcgattcaaacgggagcacacgctgccctcgcatgaggcgattatggactggtatcgcggcaccggcatgcgtccgtatctgcaggcgcttgacgacgccggccgcaagaagttcgaggccgaagtgttctcccaagtccgcgaggaataccccacacagtcggacggcagcatcatcttccccttcccgcgtttcttcttcctcgcgactcggtagaagctcgccggattcgtgtactgggcggcgcgacctgtttcccgcgccgccagctgtgggttggcctcgctactgggcttgcggtgatgccgctggctgctgcgctgcttccgattgcgatggcatttgcatatgcggtgcgatgctggggaacagaattggttgcaggaatggccaggcggtttcctcggcgcgcacgatgaacgccgggtccccgttcgggccaaggagcacatggccatatggcatgagcatggtcgccagagacgagatgacttggcctatttccagtgtgccgtcatgcatgcactgcttcaatatgaggtctcgctgggcgatgaggtcgtcttcgatctggtcacgcacgtcgcgcacggacgagaaatacaggtagaacgtggcgtgattgtagccggcgagttcggtgatctgacgcaccgagatcttctcgatcggcttggtttcatacagcttccagaacgcctccttaaggcgattgaccgtctgctgcgtaagttgcgggttcttcttgattgcgattcgcggtatggtgatttcgcataagacgcacaaccccatcgattcgtcggtcaaattcgtgaccttctcgatgcgatgctgtcgctggtggtcacgcaggacgtgctgttggaatcccagggaaccgcgcacgcggcgcaatcctcgggactgttcggcatcgggctcggcgtggtggccgtgatcatcggcctgtggatgttgctgagacgtaagtggacggcaacggaataggaatagtgacagcggaatagcgcgcgtgatattggtacgcgacgtatcgtaaaagcggctacaatgcttacggcaaaagtctttgcaacgagaaggaagacatgactgagcggcgtcgagcacggatgaggattcgtcgtcaacgaatttacgttgtacggcgcattgtggttgcggtatgcgcattgttgtgctgcgttcttgccgtcttctcgacgattgacgcccaacgggtgtggccccgcggtgagtcggtcgcacaggggcaggcagaggttcaggggcaggcgcagaaggtgagtcaatccgcgcaacagtcggcatcgcgagtgtctgcatcggcctcatccttgggccgccagcaggtaccggtctttaaccaggcgattcaggagcagcgtgacaaggaagcgcaacgtgcgcgatggacgaatcccaccggcaagcagcctgatttgtcgcaatactccgatctcagcgtgaaagtcagtatcgccaagcaggaagtgtatgtgcaatccggcggtgagaccatctacacgatgatcgccagcaccgggctcaacgatacgaccccgcgcggcaactatgttatcgggatgagaggcgatcacttctacaatcccgcagaaggcatgggtgctgattattgggtgcgattcaacggcccgttcctcttccactcggtgccgaccggggcgaactccggcgagtatatggaagaggaaggcaacaagctcggtcagccggcctcacatggttgcgtgcgactcactgtggccgatgccgaatggttctacaaccaaattccggaaggcacgccggtcaccatcgcctgaggcttggcctgagatcgatactgaggctatcgtgctttaggcgtctgatattggtcgtcggtagtgaagcaggtgcgatagaccatggccatgatcagaccgtcggccagcaaggtcagcgcggcgatggcaccgaagaccacgaactggtatttggcggcgttcagcggatctccgccggctatcacctggcccgccatcatgcccgggatggtcacgatgccgctggaggccagcgaagcggtggtgggcagcagtcccagccgaatcgacgagatgatggatgggcgggcggactcccatgccgtcgcccccaaggccagcatcatatccacctcgtcgcggcgttcctccatgctttcatagaatcggctcagcccgacagcgagcgcggaaacggtgttgcccagcagcatgccggtcaggggcaccaccagctggggcgcataccatgggtgtgggcgcacgatgagttcggtgaccaacgccagcatgagcagcatggtgatgaccaggctcaggaagatcggcccggcaaggcccttggggatgccgcgtgcgcgggacatcacgatctgcacggccgccaccagcatgaccgccatcagggagaacaccatccacacgttgttcgaccggatcacgtagccgatgatgaagcccatggcgcacagctgcaccaatgcgcggcacgacgaccacatcagggtcttgccgatgcccatgtgcatcagttcgctgatgatggccgccacggccaccatgcccagcgcgatgagcagaccccagatatcgatgttgtaggaattgcccagatcgccgctcatgcctgcgtctcctcattttcatcggcgccgtcaggcaccgcgttcgcgtcctgcgccgccgaatccgtcatctcgcgttcggtcagccgccccttgtccagcgtcagcgtgcgggtggcccgtccgtccggcggacggtggcggatgcggatgatcgccatgccgcgtgtggcggcatccgccatgatcgtagccaccttggctgcgttgtcgtcgtcgagaccggcatctacctcgtcggccagcagcaccttcggatcggtgagcagtgtgcgggccagggccacgcgggccgtctggccgccggacaggtcgtgcggggcgcgctccagatcgatgtcctcgcagcccatcgcgtccaacgtcgtgcggatgcgctcgtcgggcagcagctgctcggccttgccgcccttgctgcgaatcgcgagcgtccagggcaggcggatcgcctcggccacgttcttgcccgtcagaatcggcttctgcggcaggtaggcgacatcccgccgccactgctgcggcgtgaactcgccgctgcccttgccttcaagggcgaacgtgccgtgcgcatgcgggttgagccgggcgcacgcggtcaacagactcgacttgccggagccggacggtcccaccagatcgacgatctcgccgcgctccacagcaaaggacaggttctcgaacaccgtgcgttcgtcgtccgccggcgattgcgcggggatgacgcaggacacggatatggcttcgaagaaggatcgcatattcatccagtctagccgggggcacatgggaaaccccagcgttcacttcctgtatacccggtgtggcataatagccgaggcaatttttgggctttgcctaagctagtttgaatttgaaataggtgaataacgtggcacagactactaacgacatcaagaacggatccgtcctgaacctcgacgggcagctgtggaccgtcatgaagttccagcacgtcaagccgggcaagggccccgccttcgtgcgcaccaccatcaagaacgtgctctccggcaagatcgtcgacaagaccttcaacgcgggcatgaagatggaattcgagaccgtggacaaccgcactctccagtactcctacgaggacggtgacaacttcgtgttcatggacatgaccacctacgatcagatcatggttccgaagacccttctgggcgacaaggccaagttcctgctcgaaggcaccgactgcctggtctccttccacgacggcaccccgctgagcgtcgatctgccgggctccgtggtcctgaccatcacccacaccgagccgggcctgcagggcaaccgctccaacgccggcaccaagccggccaccgttgagaccggagccgagattcaggtcccgctgttcatcaatgagggcgaccgcgtcaagatcaacaccgaggacggttcctacaccggccgcgagaacaactgatctccgcatcctcaacagacgaccgaccgtataaaggactaggacagcagcagtatggcacgttccaccgcgcgcaaaagggctctgaacaccctgtacgaagccgacgaaaaaagccaggatattctctccctgcttgacgagcgcatcgcacatcccggtgcccagaccccgcttcccgactatgccattgaaatcgtcaagggcgtggccgagcaccgtcgtcagatcgacatgaccctggacgaacactccacgggttggaaggtccgccgtatgggcgtggtcgatcgcaacattctgcgtatcgccgcttgggagattctgttcaccgatgatgtgccggacaaggtcgccatcgacgaggctctggcattggccaagaccctgtgcgatgacgattcgcccgctttcatccatggcctgctgtctgcggtgtgcaccgccaagaatgcagcaccggcaccggagtccgtggcagaagaggccgatgaggaatcgtccgattccgctgccgccgcatccgagccgaccgatgagggcgatgtttccgattcgcccgattcgtccggtgcatccgacgagcctgctgccccgtccgctgagattcagccgacggtcgattagtcatttgttgttcagcctccccattcgggaggctttttcatgggcggacacttgtgccgccgtacattctcaagtcggcaccttgccgacagccccgccagcgggggtgagactttgcgtccaacggcgtgtgagtctgcgctggccgttaaccttggtacgaatacccgaaaaacataagggggttttggtgagccagaacgagtccgggaccatcgcaattccgatgtatgacaaggacgatgcagtcctcgttttggaagacggacaggtatatgtggggaagccatacggcgcccttggcgagacgaccggtgagatcgtcttcgccaccggtatgaccggataccaagagacgctcaccgatccgagctacgatcgccagatcgttgtgcagacgttcccgcacatcggcgataccggcgtcaacagcgaagaccctgagtcctcccgcatctgggttgccggatacattgtgcgtgatccctctccgaacgtgagcaactggcgtgccgaaggcagcctggacgacgacctcgccaagaacggcatcgtcggcctgagccacatcgacacccgcaagctggtgcgccacttgcgttccgcaggcgtgatgcgcgccggcatcttctccggcgacgccctgaccgatcaggccaccggcgcgctcaagaccatcgagcagctgctcgaagacgtcaagaacaccccgcagatgcagggtctgagcctgtacgacgaggtgtccaccaaggagacctacaccatcgaaccgtgcggcgagtacgaaggcaaggagccgctgtacaccgtggccgctgtggacctcggcatcaagggcatgaccccgcaccgcatggccgaacgcggctgccgcgtgcacgtggtgccctccaccatcaccttcgccgaaatcgagaacctgaacccggacggcgtcttcttctccaacggcccgggcgacccggaacaggccggtcccgaaatcgagctgctgcgccaggtacttgacgccggctacccgttcttcggcatctgctttggcaaccagctgctcggccgcgcactcggcttcggcacctacaagctcaagttcggccaccgcggcatcaaccagccggtcaaggatctgaccaccggcaaggtcgaggtcaccgcccacaaccacggcttcgcggtcgacgccccgatcggcaagcaggtcgacgcgccgtttgaaaacggcaagtacggcaaggtgttcgtctcccacatcgatctgaacgacgacgtggtcgaaggcctgcagtgcgtggacatccccgcattctccgtgcagtaccacccggaggccgcagcaggcccgcacgatgcggcctacctgttcgaccgtttctgcgaacttatgaagaacaactccaaggaaggtaagtgatatgccgaagcgcaccgacatcaaatccgtgatggtcatcggctccggcccgatcgtgatcggtcaggctgcggagttcgattactcgggcacccaggcatgccgcgtccttcgtgaggaaggcatccgcgtcatcctcgtcaactccaacccggccaccatcatgaccgacccggagatggctgacgccacctacatcgagccgatcgccaccccgatcctcgagcagatcatcgccaaggaacgccccgacgcgctcctgcccaccttgggcggccagaccgcgctcaacgccgccatggcgctgggcgaggccggcgtcctgaagaagtacaacgtcgaactgatcggtgcttccctggaagccatcgaccgtggcgaggaccgtgaactgttcaagaaggtcgttgacgaggccggcgccgaatccgcccgctccgacatcgcccacagcatcgaggaagtcgacaagatcgccgagaagttcggctacccgctggtcgtgcgcccgagcttcaccatgggcggcctgggctccggcatcgcccacaacgaggaggagctgcaccgcatcgccggcgccggcatccattactcgcccaccgacgaagtcctgatcgaagagggcatcgagggttggaaggaattcgagctcgagctcatgcgcgaccgcaacgacaacgtcgtggtcgtctgcccgatcgagaacgtcgacccggtcggcgtgcacaccggtgactccatcaccgtggccccctgcttcaccctgaccgaccgcgaataccagaagctgcgtgacatcggcatcgccatcatccgtggcgtgggcgtggacaccggcggctgcaacatccagttcgccgttcatccggacaccggccgcatcatcgtcatcgagatgaacccgcgcgtctcccgttcctccgcactggcctccaaggccaccggcttcccgatcgccaagatcgccaccaagctggccctcggctacacgctcgacgagattcgcaacgacatcacccagtccacgccggcctccttcgagccgaccatcgactacgtggtcaccaaggtgccgcgcttcgctttcgagaagttcccgggcgccgaccccaccctgaccacctccatgaagtccgtgggcgaggccatggccctggccggcaacttccaggagtccctcggcaaggccatgcgctccatcgacaagcgccacatgggcttcaattgggatggcgagaagccgtccgccgaagaagtggccgaactgcttgaggccatccacaccccgaccgaacaccgttacctgcagctcatgcgcgccatctggggcggtgccacgctggagcaggtgttcgcggccaccaagatcgacccgtggttcctgaagcagatcttcctcatcaatgagaccgccatgacggtgcgcgaggccgaaaccctcaccccgaggctgctcaagaaggccaagctcgccggtctgtccgacgtgcaggtggcccacctgcgtggtttgggcgatgaaggcgagaacaccatccgcgaactgcgctggacctacggtctgcgcccggtctacaagaccgtcgacacctgcgccgccgagttcgacgccgccacgccgtactactacagctgctacgccgacgaaaccgagctgcgcccgcgcgaacgcgaggctgtgatcatcctcggctccggcccgaaccgcatcggtcagggcatcgagttcgactacacgtgcgtgcacgccgtgcaggagcttggcaaggactatgacaccatcatggtcaactgcaacccggagaccgtgtccaccgattacgacatgtccgaccgcctctacttcgagccgctcaccttcgaggacgtgctcgagatctacgaggccgagaagaagatgggcccggtcaagggcgtcatcgtccagctcggcggccagaccccgctgtccttggccgcgcgtctgaaggccgccggcgtgccgattctcggcaccaccccggaatccatcgacttggccgagaaccgtgagctgttcggcgaagtgctcaagaaggcggagatgaacgccccgcgttacggcaccgccctgagcctcgaagaggccaaggaagccgcccaccgcatcggttacccggtgctcgtgcgcccgagctacgtgctcggcggccgtggcatggaaatcgtctacgatgacaagcagctcaacaagtacgtggaccgcgcacttgccgaggccaaggccgataccgtggtctccggccgcctgccttccccgctgctcatcgacaagttcctgcaagacgccatcgaaatcgatgtcgacgcactgttcgacggcgaggaactatacatcggcggcattatggagcacgtcgaggaggccggtgtccactccggtgacgccgcctgcaccctgcctccgtccaccctgtccgacgaccagattcgtcgcctgcgtgaaggcacctacgccatcgccaagggctgccatgtgcagggcctgatcaacgtgcagtacgccttcatggccaacacgctgtacgtgatcgaagccaacccgcgcgcctcccgtaccgtgccgttcgcctccaaggccaccggcgtggcactggccaaggccgctgcccgcatcatggccggcgaaaccatcgccgatcagcgtgccaacggtctgctgctgcctaagggcgacggcggcgacatccaccccggccagcaggtcgcggttaaggaatccgtgctgccgttcaagcgcttccgcaccccggtgggcaagaccgtcgacatcctgctcggacctgagatgcgttccaccggtgaggtcatgggcttcgaccgtgacttcccgcacgccttcgccaagagccagctcgccgcctacgacggtggcctgccgacccacggcaacgtgttcatctccgtgaacgacaccgacaagcgtcagctgccgttgatcgccgttcgtctcgaggagcttggattcaagctctgggccaccgagggcaccgcctccgtgcttcgccgttacggcatcgagtcgaacatcgtggacaagatcagcacccgcgtggataccgatccggaagccccggtcgaggtgcatcacgctgccggatccgtgggcaagaacgtggttcagcttatcgaggaaggcaagatcgacatgatcctcaacacgccgaactcgcgcggctcccgttccgacggctactccatccgtgccgccgccattgccgccgatctgccgcagttcaccaccatcaccgagttccaggccgcactgctcgctatcgaggccgtgaagcataatgattatcagatcatgagcattcaggagcattcgaagcagctgttcgaattggagcgacgggagttctgatgactacactcagcagtgaggaattgcaggcacaacgttcggatttcggtctgcgattaagcaattcaatggccaaatacgggccgctgtgtgtgggcattgacccgcatcgcaagctcctcaccgactggggatacaacgtcgacgccgaaggcgccgaactcttctccatgcgtatgctgcaggccgccaacgggcgcgccgcagcagtcaaattccagacgccgatgttcgagcgctacggagccaaaggtttcgaagcgctcgagcgcgtgctctacgcggcacgacaaatgggcgtcatcaccatcgtcgattgcctgcgcggcggcctgtccaccacgatttccgccatcgcagacgcctatttcaagcccggtgcaccgttgctggccgacgccatcacgctgctgccgtactatggcgcgcgttcgttgaacggcctgattaccgaagcgctggaaaacggacgcggcgtgttcatcgcctccctgacctccaacccggaaggcatgagtctgcagaccgcgttgcgccagagcggcgattacaagggacgtaccgtggcctacggcatcgcctccaccgcgcagaagcataacgtggatatcgaaggcatgggctcggttggtctgattatcggtgccaccatcggccaatggatgcaggattccggcgtggacccctccaagttcaccggtccgattctttcccccggttacggttggcagggtgccgaggccaaggatctgaaaaccgtgttccgcggtacgcgcggcaacgtgctggtcaccgtgtcccgctttatcgcctcgcatgggccggatatcgccgcactgagccaagccaccgagtcgattgcgcttgacgtacgtcaggcgctgatggaagccactgtcgaaggctcggaaaaccagtaatcagaacggaatcagatgtcgcggcatgcgtacgtgtctatctcatcgcgtacgtcgcatcacgattcatattcttccctgttcgtcggggctgtagcagttaccggtcatctcgccggtgagccgttaccacattggattcataatcgctgcacaccacatcatctccggaggaacccatgactgaaaacacccatgctggccgtctaatcgtcctgactggccccaccgcagtaggtaagggcaccgtggaagccaagctgcgcgccgaccaccccgaagtgtgggtgtccgtctccgccaccacacgcgctccgcgcccgggcgaggttgatggcgtcaactattggttccttactgaagacgagttcctggcccgcgaagcggccggtgagttcctggaaaccgccgtggtgcacggcatggcccactacggtacattgctcaagcctgtggaggaacatctggccgccggtgtgcccacgattctggaaatcgacctgcagggtgcccgccgcgtcaagcagcgcgccgccgagctcgacctcgaagtggtgtacgtgttcatcgcgccgccaagcttcgaagagctcgagcgccgcctgatcggccgcggcaccgaaaccgccgaacaacaggcccgtcgcttggagaccgccaaggtggagctcgccgccgaaagcgaattcgacgtcaccatcgtcaacgaaaccgttgatcaggccgctgccgacctctggtccgtcatcgccaaggaatacgggctgtaaactaccgctttaccaccaactgctggtggaggatttcggcgctgtttttggccggcgcctgcttccagcggatcgcttcggattcgtgatgctcggtgacataatgccgcatccattcgaagcactgctgggtttggatggcatcgcttaatgcgcggtgctcctcattgtccgcgatgccgaagcgtacgatcaggtcggccagacggtgatgccgctgcgcggggaacagggcgcggctgatctgcatcgtgtcataatccgcgcaggcaaagccgcagccggcgatatgccgggtgttgtaatccaggaatcgcagatcgaagctgacgttatggccgacaatcggctcgacggcgggaccggcagccggggtagcgagccatgcgatgaatcggggaagcacctcgtcaatcggatcgaggtcggccaccatcgcatcggtgatgccggtcagcgtggtgatctgacgcggaatcggccgcaagggattcaccagctgctggaattgatcgacgatatgcccctcccgcacgcgcacggcaccgatttccgtgatggcgcaactgttcgggtaaaagccggtggtctccaaatccagcgccacataatcggtggggaagacggcatcgtccatggcgattcgcccgccggcaccatgattgggctgggatggttggccgaaaacggtaatgccggaagtggtcacggaggctcctcatatcagtcggtgttcggtgacttattgtaccggcatcccggtctgacggtaaaattattccctcccggtttttctcggatatattggttaggcggccggcaattgcgcggcgcatcgggaagggagcacagctgatgaaacagatagtggcaggcatcgtggcgcatgtggacgcgggcaagaccacgctgtccgaggcgctgctctaccgtaccggtgagatccgcaaattggggcgagtagatcacggcgatgcgtttctggacaccaattccttggagaaggcgcgaggcatcacgatcttcgcgcaccaagcgttggttgaacacggcgacctgcgactgaccctgctggatacgccggggcacgtggacttcgcagccgaaaccgaacgggtgctgcgtgtgcttgattacgcgattcttgtggtctccggcacggatggcgtgcaaggccataccgagacactgtggcgtctgctggccagatacggtgtgccgacgttcatcttcgtcaacaagtgcgacgccgccggattcgaccgcgaggccattctggcacagttgcgcaaacgcctgagcgatgcgatatatccgctgccggcaatggagcagtccactgagggcagcgcggtaccgttggacgcgcttgccgaggatatcgccaccctggacgaggaggcgatgaacgactatctggaacatggcgcgctgtccgtggacagattgcgatcgatgatcgccgtgcgcgagctgttccccgtatatttcggctcggcattgaaactcgaaggagtcgaggaattcctggacgggctggagacgttcacccgcgaacgtgaatggccggccgccttcgccgcacgcgtgttcaaaatcgcccacgacggccagcacaaccgtatgacgtggctgcgcgtcaccggcggtgcgctcaaagccaaggagatcgtctcttcatcctcgtgcgccgcggcgtcgacagcaccgtcgccggtacagggggatgatggcacggtatggtccgagaaagtcgatcaggtgcgcgtctacaatggcgccaaattcgagacggtcaccgagatacctgccggatcggtgtgtgcggtgaccggactgacgcggaccttccccggcgaagggctgggagcggaaccggacgccgaatcaccgtcgctgcaacccgtgttgacctacacggtgttgcccgccggagcggaatccgatacggccggcacctcgggagcggccaaacgcggtggcgccggccataacagcgtgaatcaggacgatgccgagcatgatgccgccaagtcgggaaccggccgcaatgaggagaacgacaccgctcgccagaccgcggcggacaatagctcgccggcccgtccccagttcgatgatctgaccttgcataaggtcatcaccgcattgcgtgagctggaagacgaagacccgttgttgcatgtggtgtgggtggaacggctggccgagattcatgtgcaattgatgggcgcagtccagctggagatcatccagcagaccctgcacgaccggttcggtctggatgtgtcgtttggccccggctccatcctgtaccgtgagaccatcactgcgccaatcgaaggcgcaggtcatttcgagccgctccgtcattatgccgaagcacatatcctgctggaaccaggggagccgggcagcggagtcactgtggcctcggccctgtccgaaaacgatttggaccgcaattggcaacggctgattctgacccatctgaccgagcgtgagcatctcggtgtgctcgttggcgcgccgctcaccgatatcaagatgactttggtggctggccgcgcgcatctgaagcataccgaaggcggcgacttccgccaagccacctatcgtgcgattcgtcaggggcttatggaagccagagctggagtcagtggccggcccgagacgccggtcgagagccgtccggacaccgcaggggagggcaactgccgactgctggaaccgtggtaccggttccggctcgaagtgccagcagacatgatcggccgtgccatgagcgacatccagcgcatggccggcaccttcgaatccccggtcaccgatggcgaatacgccgtgatcgaaggcgaggcgccggtgtccgagatgcgcgactatgcgatggacgtgaaccagtacacgcacggccatggccgtttctccgccactttcggcggctacaagccatgccatgacgccgaacagatcatcgcagccgccgcttacgatcccgaagcagatctggacaacacccccgactcggtcttctgcgcccacggtgccggctaccccgtcaaatggtataaggtccctgaattcgcccacgtagactacgccatgtgaggtggtgactaccaaatctgcggccgaatgaatccgttggtctccaagaaccgttgaatatcgcgcatttccggcatattaatggaatgggccatgcccggatacacttgttcggtcaacgtgccgtgctcgtgccagaactcacccatcgccgtcacatcggctttcgggaagatgtcgtctgcagcaccatgcccgtagaacaccggcggcttcaacgcagccagctcggcgtctccagagaccggccccggagccaaccagccggagcaggagaccgctgccgcataccgttgcggattgcatcgcaaaagatgcgcggccaagaggccgccctgcgagaatcccatggcaaccaccggccgagtggcgggaatatgctccgcaacccatgcatcaatggcttgggcggcttcagtcgcctgcttgtctaatgattcgccctccggcacaccttcatgcgcccacgcaccgaaccatgtatatcccatgccataggcgatgggtgcctgcaaactggcataatcagccgaaccggcaccgcaatagttcagcagatcgggcaaatcgtattcattggaaccccagccgtgcaacagcacgaacaccggagcggtttcgggaccggtcaaacgggtcagagctttggtgatcttcatagcctcagtgtatccaccgtttgggcgacaataatgccctgatgttcgcccatcgagtaacgtcccataagtaatgcgtatagcgcagcggccgtgccacgtgttctgatactctacgatgacacggcaggggggacaggtatgttcggcccccgaaatcgtacatgggtggctaagaccgtttatgcgcaggagaagaaacgagaagcaaaggaaggagcgcgtccaatgacattcgattggtcgttcgtgcagcgttacgcgcctttcttcgtcaacggcacattgatgaccttattcatatccgtgtttggcatattgcttgccatcgcggtgggtctggtctgcgctggcgtggaaatcgcgcgtatcccggtcgcccggcaaatcgtgagaatctacatcgaacttagccgcaatacgccattgctggtacagctgtactttctgtacttcggcctgcccaaactcggcgtagtatggtccgccgaaacctgcgcgatagtcggccttggattcttgggcggttcctacatggccgaggcaatgcgcggcggattggaagcggtgcccaacgtgcagcgcgaaaccgcgtacgtgctgggactgacttccacgcaaaccatcacccgagtcattctgccgcaagcagtgtccaccgccattcccggcgtagtggccaatgtgatcttcctgtttaaggaatcgagcgtcgtctccgccattgcgctcgccgacgtgatgtacatggccaaggatctgatcggcatgtattacagcacctatgagtcgttgttcatgctggtcgtggcctatctggtgattctgctgccgatttccatcttcggcacatggttggagcggaggttcgattatgagcggcgctgaaatactgctccagccaggcgtattcccacgtctgttgcaaggcctgtgggtcaccgtgtggatagccggcgtatccgtaggcgcgtccatcccggtcggcctgttgatgggctggttgatgacgctgaagaatcccgtgatccgggccgcgatgcgcatctacctcgacttcatccgcattatgcctcagctggcgttgctgttccttgcctactacggttttgctcgatggttcgattggaatctcgatgccaccggtgcctgcgtgctggtgttcatcctgtggggaggcgccgagctgggcgatctggtgcgtggcgcattgcagtcgattcccaaagtgcagtacgaatcgagctacgtactggggttgagcccgtggcagaccttctcccgggtgattctgccgcaggctgttcgccgtatgctgccggcatccgtaaacttggcgacacgtatcgtcaaaacgacatcattggccgtgctgctcggtgtggtcgaggtcatcaaggtcggccagcagattatcgacgcgaaccgattccagttcccgaccggaaccttgtggatttatggcgtgattttctttatgtacttcatcgtgtgctggccgctgtccattgtggcccgccgactggaaaagaggtggtcgaatgactgaacccgaaacgacctgcaagggtttcgaggtgaatcatctggtcaaacagtatgcgaatgccgacaagccggtgctggatgacatctccttcaaggtggagcatggttcggtgctcgtggtgctgggtccttccggctcgggcaagtcgacgctgctgcgcaccatcgccggtctggaaccgattcagggcggcacgatttccatcaacaatcaggtgatcgatgccggcaagcctggcacggaacgagccggacgatccgaccggtccagtgaactgcgcacgcgtatcggcatggtgttccaaagctacgatttgttcccgaacaaaacggtgctcggcaacatcaccatggcgccggtgctcgtgcagaaacgcgataagtccgaggtggaggctgaagcgatccggttgcttggccgcgtgggacttgccgatcgcaaggactcttggccgcacgaattgtccggcggtcagcgccagcgtgtggccatttgccgtgcgctgattctgcacccggaagtactgctgctcgatgagattacggcggctctcgaccccgaaatggtgcgtgaagtgctcgacgtggtgctcgaactggccaagtccgggcagacgatgcttatcgtcacccacgaaatgcagttcgcgcgagccatcgccgaccacatcatcttgctggacggcgggcgcatcgtcgaggaatcgtatgatgcgcaggcgttcttcgaacacccgcaaaccgaacgtgcgcagcagttcctgcacaccttcgaattcgagtgattcgattgtgccatatcgacgtatttgagaagaaatatcaataacaacaagagaaggagaacccaatgagtatcaaggttgggaaatcattcaaagcactgattgccgcaggcgcggcattggtaatggcggcgtccatggccgcatgcggtccgtcggcaggcaccccgagcgaagcgaagtcctctgacacgggcaccagctccagcgccaatgccaaggcccgcagcctcgacgagatcaagaagagcggcaagatcaagattgccgtcttctccgacaaggcgccattcggctacgtggacaaggacggcaagtaccagggctatgacgtctacttcgccgaacagctggccaaggatctgggtgtggagccggaatacacgtcggttgacccggctgcccgtgtggacgtgctcacctccaacaaggtcgatctggtgctcgccaatttcaccgtcaccgatgagcgcaaggagaaggtcgacttcgccaagccgtacatgaaggtggcgcttggtgtggtctccccggagagcgcccagatcaccgatgtcagccagctcgacggcaagaccctgatcatcgctaagggcaccaccgccgaaacctggttcgagaagaacgcgccgaacgtcaagctgcagaagtacgaccagtacgccgatgcctacaacgcgctgctggacggccgtggtgacgccttctccaccgacaacaccgaggtgctcgcctgggccaagtccaacaagggcttcaaggttggcatcacccaccttggtgacgacgacaccatcgcgcccgccgtgcagaagggcaacaccgaactgctgaacttcgtgaacgacgagatcgtcaagctcggcaaagacaacttcttccacaaggattaccaggagactctggagccggtctacggcaacgaagtcaaccccgatgacatcgtggtagaaggcggagccgtctgacggacagtccggtggactgtccgtaggcgacgccgagccgcggcagcggcgaggtgtgttgggccggtcgtcaggccgtccattcttgcaggacggagaggtctgattatacccgtccataaccaacacatatagcaacgccggctttcgggccggcgttttgcgttaaggtcgtaatcgtgccgcgcggggaacggcttcgcgcagatgacgcaacactttaagggggtgcgcaatgaccaggttcaacactcagctcgtccacggactgccggttggagacaacaacaccggagccgtgaacccgccgatctacaactcaacgacatatgccttcgagaaggtcgacgcgatgccccgttacgactatgcgcgcagcggcaatcccacacgtgacttcctggaacagcagatcgcccagctcgagcagggaacgcgtggttttgcgttcgcctccggtctcgcggcgattcacgcggtgctgagcattttcaagcccggcgaccgcatcgtggtcggtgacaatatttatggcggatcgtattcccagctcaatgagttcttcactcgctggggaatcctcgtcgaggccgtcgacactcaggacatcgcagcattggaggccgccgtcaagggcgaccgcgcgaacggcatcgtgcctgcccaagccgtctactttgaaaccctgaccaatcctctactcaaggtgaacgacgtgcgcgccatctccacggtggcccaccgtttcggggcgctttcgattgtggataacacgttcgtgaccccgtatctgcagaagccgcttgctttgggtgccgatgtggtgattcactccgccaccaagtatctggccggtcattctgatgtgaacgccggtctggtggtcgtttccggtgaggatctggcgagccgcgtgtacttcgcgcagaaccgtttgggtggtgtgttggctcctgctgagtgcgacgcggtgcgccgcggcattcagacgctggcccttcgcatggatcgtcagcaggagaatgccaatgccatcgcccgctacctgctggtgcatccgctggttaaggcggtgcattacccgggtctgcccggcgcaggcgaccagcgtctggctgccaaaggtctcaagggggccggtggcgtgttgagcttcgaggtcgtgcctggcgttgatccggctgacgtgctcaacaacctgcacctgttccgtcttgctgtgtcgttgggtgcggtggagtctcttgccgagctgccgtgtcgtatgacgcatttcgaactgcctcgcgaggagcgtctgaagatcggcatcaccgatgaattggtgcgtctcgccgttggcatcgaggacgccaacgatctgatcgaagatctcggccaggcgttcgatatcgcttacgcccgttacatcgatcggcatgccgacttcgacgtgttccaacagctgacttcggggggtgtttgcctgatctaattcttttctgcctatttttctactcctggggagcggcgtcggttgtgccacaccggagccgcttttttatgctctggttccgcctccgctggcagagggctgtcggcgtagccgactggggtggttaagcggaccgcccgcattatgccaaccgcgatatcacagcatccccgttacgatgaatacggtttgatagtgcaccgcgtaaaagtcaagcgcggcggaacaaagaaaggacccgatatgaccatcgacgtctacggtgccacatggtgtggcgactgccgccaggcaaagaacactctcgacaaactgggcgcggcatacacttggcacaacatcgaggaagaggaaggtgccgccgaccgtgccgtggcgatcagcggccagatgcacattccggtggtgcggtacgatgacggctcgttccaagtggaaccctctgcagtggatatcaagaacaagctgcaggagctggggctgctggctgactaggaatccgtggtctgagctgcataaggcgtgcgtcatcgatcggtcttgatggcgcacgccttatctgtttggcagattctagtggtggttgcaacacctgaggtttgagcggccttccatggtcacgttgtcggttgttgaggttatcacgcggcgtcgagcagttcgatgatcttctcgcttggtttcatgaacccgagggttttgcgtggccggtcgttgagttcctcggcgaccgcgtcgaggtagtcctccgggtagacggataggtcggtgcctttggggaagtactggcgcaggagcccgttggtgttctcgttggtgccgcgctgccacggggagtgcgggtcgcagaagtagacggccatgtccagcgaggcgccgatccgtttgtgcagggcgagttccgctccctggtcccaggtcaggctgttgcgcaggagtttgggcaggtgctgcatcttgtcgatgatggcctgctggacgtgttcggcgtcgtgcccgtcgggcaggtgcagcaggatcgtgaacctggtggtgcgctcgacgagcgtgccgatcgcgcttttgttgcggctgccggtgatgagatcgccctcccagtggcccgggaccgcccggtcctcgatctccgggggtcgctccgagatcatggccatgggttcgcggaaacggggtttgcggccttggccgccttggggtctgcgggcggttcgcccctgcctcatggcgcgtttcagctcctgcttgagttcgcccctggcctgcaggtagatggcctggtagatcgtctcgacgctcgcgtgcatatccccattatccgggaagtccagcctcagccggttggctatctgctccgggctccaatgcctgcgcaacccggcggcgatctcgtcccacagtcgcgtgccctcggccgccttgcgcggtttggggcgtttgagccggtccgcggccttctgctgggcgcggtaaggctcgtaaccgccggactcgggattcctgttgcgctcgacctcgcggctgaccgtgccggggtcgcggcccagcaggcgggcgatggcgcggatcgaatcgcccagacgcagacggtccgcgatctggatgcgctcctcctggctcaggtagcgcggatggagggtcttgggtttgtccatggtggaacgataccagtccaccaggggtttctcgttccttcccgtggcgcgcgtcctgccgttgcgccacgccttgccggtgcgtttcgagacgccgaccgcgtgcgcggcctgggtgaagttcatgccttcctcgtccagcaggcgcacgtactcggcgcgtctcgcctcgcacatcagcttcctcgtcggatattcgacgccgttgaacgtccaacggtgttccccgccacggtcttcgtttcggtggcttctggtcacctgaccctccttgcggtaggtcaggtgttgcaacgatcactagaacccgcctttatgtggatcagagagtagggggggcttacgcttcggtgcccactactgttccaattgccgggctttgaccccaatgcgatttcggtagtcggcaagcatattggcaagcgtaacttccctcatggaatccgacatggctttggccactggagcatacgcatctttgagaacgtcgtggatattccgagccacggggcatgtgtgattccctctctcgtggatgccgatcacatcatcgaggttcgtggattccactgcctgatggatatcgagcagagtgatttccttgggggtgtgggcaagttcggcgccgccggttccgcgtgccacggtgatgagccccgcgcgtttgagcgctcccaaggcgttacgaatgctgacggcgttcgtcccggtgctttcggagagcagcgcgctgggcgccgatcgttatttcgactatcgcatcgagaactatgctgaagctctttctgacgcaccggttgaccatgtcatcgacaccttaggcgaaacggcaaagttgttatccggatggagcgaccgagcgtctttgcgctgattgctgatttgatatgcgttatcgccagatatgaaaagagaaccatgactcccttttgatgagattgtctgaaggccaacgattggtccggatgcaatatgtgtccaaggaagtttctgaagcgttggtgtcgcaaattactaaagggttcggcatcgatgtcaacataatctttggagatatcgacatcgtcgcggatactccggtagagggcatcgtggccattttcgatgatgaaccggtacggattgacgcggctttgaattatttgaggcagcgtaatattgcggccgaggtgctgaaagagggctaggcagcttggtgtgttccggcattcggcggatattctatagccattgcttataagcgcgcattgacaattgcgataccgatgtgccggtgtcgcgtaccatgacttgctaagttcgggaatagagtcgagcccgccacaatagagcggcatgaggaagaaggattaatgggcgttgatttccgaacgcaagccatccacgccggctacgagccgctggataacggccgtgccgctgtgccgccaatctatgcctcggccgcattcgacctgggtgacgcggcgcgcggcgatgcgctcgcgggcggtgacatcgacggcttcgagtactcccgtgtggccaatcccactgtcgatgcactggaaaagcggcttgccgcgctggaggacggtatcggcgccgtggctgtcggctcaggcatggccgcagcatactgattggatgccgcacttttttataagaagccagcatgcacacatagtgaacagttgtacacatatgcgtacgatgtctaccgctttgttttgaacgctgatacgatggaaatcacgagtcgaggccgagggcggtttcgacgtgggtgaagggaaaacatcatggccgtattctttgctggtccgctgattatcatcgtgctactcattgttctgctgtctgccgcactcttcgtcgtgccgcagcagcaggcctacatcattgagcgattcggcaagttccttaaggtgcagttcgccggcatccatatccgcattccgtttgtggaccgcatcgccatgaaaacgaacatgcgcgtcaaccagcttaacgtgcagctggaaaccaagacgctcgacaacgtgttcgtcaccgtggtggcctccacccagttccgcgtgaacccgaacgatgtggccaccgcctactacgagctgcgtgacccggccggtcagctgcgctcctacatggaggacgcgctgcgttccgctatccccgcactgtctttggacgatgcctttgcccgcaaggacgatgtggcgttcgacgtgcagaagaccgtgggcgccgaaatgagccgtttcggcttcaccgtggtcaagacgctgatcaccgccatcgacccgagcccacaggtcaagaacgcgatggactccatcaatgccgcccagcgtgaaaaggaagccacccgtcagcgtgccgaggcccagcgtatccagatcgagacccaagccgccgccgatgcggagaagactcgcttgcagggtgagggccaggccaattaccgccgcgagatcgccaacggtatcgtcgaccagatcaagagtctgcaggctgtgggcatgaacatcaacgacgtgaacaacgtggtgctgttcaaccagtacctcgacgtgatgcgctcgctgtccgaatcgaacaacaccaagaccgtggtgctgcccgcctccacgcccggcggttatcaggatctctacgagcaggtcaccaaggccatgctcaccgcttccgagacgaagtaatcaccccgtttgcgaatccccatccatcgatagtgaagcccctccaagcgagggacttcactatcgctatgcctgaaggaatgccggaatggcctcggccgccgcgtatcccttgcgatacatcatttccaggccctcgaagttcttcttcagggtgttgagaccatacaggtcttcgggtgcgagaatcagcactttgccttccgcctcgtaatgcttggcgagttcgagttcgtcgttgtaggtcttgtagcgcatgcgcagcttctcggccgcggcggggtgggagcgttcgaggatgcgggccggagccaaatccttctgctgcttgcgcacttcgtcacgcaagcgagacagaatcagaatcacgcgatcgtagccgtcctccagcgccttctgcaccggcaccggatcggcgatgccgccatcgaaatacggcacaccatccaccacatacggctcgcaggccaccggcacggcggacgaagccttgatgatgtcgaaatcatcaaaacgcacgcgcgatttgtcgaagtacttggtcgagccgtcctcggcattgcaggccaccacggtgaacccggtctcattggcctcgaacgccgcgaaatccaacggattctcgccatcgtgattgctcagcgtgccgtagatgtagtcgaggttggcaaagttgtggttcttgaagaagctttccgcactcgcgtactccttgcggaaggcgtacttggtgtagaaggtgtggttgcggccgtgctggcgtgcgatgaatgaggtcatattggccgcgccggcggaaacgccgtagcacatatccacgtcgatgccgtcctccagcatgcggtccataacaccacagccgaaaatcgcgcggaacccgccgccgacatcaatcatcgccgtctttgtcataccaaccccctgttcacttgaatctggtatgagcttacgcgtgctgcacggacaacgatatgggcagtgtgctgtgaatttgtctggttcttccttggcttccctcagagaggggagccaagaacggctcatacgttcagcaatttgcgcgacaactcggcaatccgttcggacggatcggaattggcgagctccacgccgccggtcgcgtcttcgggtgccagtttgcccagggactccaacaccacgcccagatggcgcacggtaccctcattgccgtcgatgacagcagcccgttcgggcagcagctcgcggaagtagtcgcggtagaacacgaaatgcgtgcagcccagcaccaccgagtcgatatgctccatgtcgtactggtcgaagtagccgtgcagcgtgcgcatcaccaggtcatggtcgccgagccgcccggattccacgatctccaccaagtcggggcaaggctccttgaaaatcgtgttgttggaatcgaatcgatccatcagtttggcgaacttccgctcacgcaaggtcaggggagtggccgccacaatcaccctctggggaatatgatgcgggtcggaaggcacgtcaccacggtcgcacgccactttcagggccggctccatgccgatgatcggaatatcgtagtgttcgcgcaaatcgttcaccgcggcggaagtggcggtgttgcatgcgatgaccacggccttgacgccttgacgcacgaaccgttcgacaatatcgaaactcagggccctcacttgttcaggcgtcttgatgccgtacggtgcgttggccgaatcaccaaaatacagcacatgctcggccggcatatccttggcgatttggcgagccacggaaataccgccaagacccgaatcgaatacgccgattggagccgaagagctcatgcctgaatcctccctatagccatgcctgcaaccgtatgttgccgcgaccgatcacaaagccgattgttttgtggtgttgtttcgctccctagagtactctgaaagccatgagtcttccgcaacgagtaaccaagacacacgcaaccggcaatgatttcgtggtatacctcgacaagtccggcaaattcgagcctaccgccgatgaggtccgattcctgtgcgaccgtcacttcggcattggcggtgacggcctgattcgcctgacacggcctgatttcgtgtctgatttaagcgatgatcagctttcggacgtactggccgggggcgcgaaatggttcatggactatcgcaatgcggatggatcgttggcggagatgtgcggcaacggtacacgcgccatcaccttgttcgctcagcgtgagggggtggccgactccaccgagccgttccgcctcggcacccgtgccggcgtcaagattctgacgccacgcggcaatatgaggccgtacggagccaacgtgttccaggtcgaaatgggggagtggaagatcggcgaaaccgacgcctacgaggtcaccatccccggcactgagggctcggcgcgcggtacgtttgtggatatgggcaacccgcatgtggtcgcggtgatcgaggatgccttcgcgtccctgccagtggttgaatcactggatttggtcaccaaaccagtggtggctccggtcatcgaatccgaccagaacgtggaattcgtgcgggtcgacgacatcgatcagagcaccggcgtgggtgaagccacgatgcgcgtcaacgaacgtggctgcggcgaaaccctgtcctgcggcaccggcctgtgcgccacaggcattgtgctgcaggccaagaccggcatcagccactgggacatcaccgtacgtggcggcaccctgcgcgtggacgtcaccgacagcgacgtaaagctgaccggagcagccacgctggtcgccgatatcgatttgttgtaaaggaatcaggcagcgaacagggccgcgccttcggtgacgatgatgagtaccacgatcgccacgatccacagtatgtcgaccatgaggtcgatgttgaggcggtaatacttattgagtccggccggcaccgccgcgacctcagcctcaccgtcgctatcatcagccgccacagccttacgcgacggcaatccctgcacggccacggtcgcatggctcaacgccatgaactggatggtggtggagaacatcagggtcaggcaccacgggcacagcgcgtgaatcacgaacagcgactgcgtgctcagccagtacgagtaagccaaagcggccagtccgcccagccacgtgcaggtcgcgaaccaacgcggcaccttcacacgcgccaaaccgatcaccgcgatggtaatgaacaccgattcggcggcgatgccgaagaacgcgttcggatagctcagcccgccgaacttcgcgatttccgcttgccaggactgggccaccgccgaacaggacaccaccgagttcagatcgcagccgagtgcggactccggatgccgagccaattgcaaagtctcagcggacagaatgagcgaggcccccaacgccactgccgaggcaatcagcatgatgagatatgtccaagtggcactgtggcgccatccaatcaacggtcgtgcctccgccaagccaagcggcgtggtgttcgtggtgctggatgatgtgtcggttgcggtgttacgagtcatcatgtccctttcgatagcgctgcgctccagattagcctctgcggttgtcagctgggtgccgaatgtctggtttcggccgttggcagaaggtgacgacctgtctgcgccttgcgtgggaatgctgaaatgaggttacgatggaaggtatgactggatatgtgatgcctttggaaccgcccgccgtcgggtgggacatccactgccataccgccttttcggatggcacggaaacgccggccacgttggccgaacaatccaaggcattgggactcaagggcgtggccatttccgatcatgacaccaccgccggctggccggaggccgaagccgcggctcatagggtcggtttgccgttgctccgcggcaccgagatcaccgccacggatgagaacgtctccgtgcacatgctcggctaccagtatgatcccacgaatcagcacatcacggacttgttcgccaatactcgagccgcacggttgcaacgcacgcagcgcatggtcgaattgttgtctcgtgattatccgattacctggcaatccgtgctcgcccaagtcaaggagggtagcaaaaccaccattggccggcctcacatcgctgatgctttggtgagtgccggcgtatatcggactcgttcggaagcgtttgcggatgcggtcagcgcctcatccaaatactatattcccacgccttcgccgacctctcatgaagtggtggccgccgtcaagggagcgggcggtgtgattctgatcgcccatgccggtgatgtgagccgtaaccgcagactgttgtccgatgaccagatcgaggcattgatcagcgaaggactggacgggctggaggtatggcaccgtggcaattcaccggagcaacgagaacggctgctcaccatctgccgccggcaccagctgctggtcaccggtgggtctgactggcatggcaaaggcaaaccgaacaaactgggggagaacctcaccgacgaggccactgtcgaagagatcgttcatcgcggcgtgcttccgctatatcggtgattcagcaatacaaaagcggccttgagataatgcccaaggccgcttatgcgcgattcatggtcacagcgtgccgaagccgacggcgtgcttggtttcggagccgatgatcgcgtaaccgagtgccttggcgggcacgatgatgcgacggcccttgtcatcggtcagatcgatcgtcgcgttgtcggccacggcctgcgcgatggcctggctcacattgtcggctgattcgtcggtgctgaagttcaccggtcgtgccacgttctgaatgcccagttcgatatccatataaggctccttgttctgccgtctttgtgacgaacatcatggtaagtggccgtcgccggccgaggttctgtactctattgtgccgcgtgtctgcgtcgtcatgtgcggtgttacgcgctcggcgtggcgcggaacaccgcacacgacattatttggatgatgtggacgattcggccagcggattgccctcgctgtcatacccgtccaacccggcacgggcatcgcgcagagcgcgttcttcccgctccaacagcggaatcaccgtggtttgggcactcgaggctccgtactgaacgagactgtccggagtatcgtcattcaccgcatcgtcggtcggggcggcggattgagacgcaggggaagcgtcggttgacgtcgtgccgctatgcccgttcatactgaggagctccttcagcgtgatcgtcaccgaagaatgggaagcgccatgtgagggctgcggtttggtcgatcccgtaccggttgcgatgccggagacattcgtttgcgggtgattggcggtccggtcagcatcgggttcgacttccggggtaagatccacgtcgccagcggccacgatgtcagcggaaccggtgcgatcgggatcgggcgtgtcgtccgagacctcgaccgccgcggtaccggtgtcggactgctgcggttgtgcgggtgcctgatgacggtcgtcctgcaacaatgtgccgacggtgattgtggaaggcaaaccgggcttcgttgacgaggcggcggccgaccctgcggctggggccggtgccggagtgtgcttgatcacgcccaactggtgtgcgagtcgttcgacctgtgccttgaactgcatgatgtgatcgttgtccgcacggttcaacgcctgaatgaattcgcccacctgttccatctgcagccacaggttggccctgagcatgatgagatcgtcaagtcgagagcccatcatgcggccgtatgcggaaagcacggcgttgcgatgggattcgtcgagcttgccgaaaatccaggcaaggtctcgtgccggatcgttgacctgcatatcctgccagttggtcaccgtggtgatggtggaaccggagaacaggaagtcgccgtcggaaaatccgccgtgaaccgtgcaggtggagaacgaccacaatccctcggtgtccatgatgcgcgcccagctgtcggtgatttcttggggaacatggccggcggagcgtaagcggcgaatccaggcggtcagctgcgaacgaatctgaccggtggtaactaccggatatttggcattggccagaaaagtcgaaggcaggcgatgaatggctccgatggcggtgccgacggccgcgcagtcatccaatgtcaacaggtcgagaggccgcgcctggccatcacggtggacggcaatcatcacggtcgtctcgcctgtgggaccgggcttgcgcggggtcagcggtgtggactccgcctgggtctgctgccccacggcctgtgcggtggccgtctggccgggtcgggaaacgtctcccggggcgaacgcgaccacacggtccatatcgaagccgaggccaccaggctcgcgcgcggctgccagtgtctgcgccgctttcacacggcgaatcagacgcgtacgcccttccttggtgtcagtggcgtatacgtcgtacaacttgcctgaggcatcttgaatcacggtctgatcgatgcctttggcctcgtcggttgcgctggcctgcacgttctcgcgtacgccggccacccccagattcggcaggacggctgaggcgagtgccgccaacatataatcgctacgtttcatcacccttccacactaatacatccgtggcgattcgcaccgcagaatgacacgcaaaacgcatgattctggcgatgttttgtcgtgagcccgattcagccataggcatgagtcgtgccgtgagcgcgaatcgtgccacaatggacgcatggaacaggcgcaggggattcttgaggggctcgatgagcggcagcgtaccgccgcgactacgttgcaagggccggtgcgcattatcgccggcgcaggtgccggtaaaacacgcacggtcacgcggcgaatcgcctatgcctgcgccaccggggcatggaagccggagcgggtgcttgccgtcaccttttcggtaaaagcggcggcggaaatgcgcgcacgattgggccagctcggcgtagggggaggtactggacgttccggttcgggtgcgggaactgccggagtcacggccgcgaccttccactcagcggcattgcatcagctcaacagcgtctgggcagacatatgcgaggctccatttccgcatgtgatcgaagatcagcgtgacgtcgtctcccgcgcgatcatccgcgccaccgcacgtaccgatgccgatccgctgaccgttcgcgatgtgctcgccgaaatcaattgggccaaaatctcgttggtgtcggtggaagattatgcccgggcatgtgccatcgcccataggcagccgcccgccggactcgacaccgctcggttcgccgacgtctacagcgcctacgagcaggaaaagacctcgcgtggcgaaatcgattttgacgatattctgttgctcgtatgccatatcatggatggttttcccgaagccgccgcccaaattcgttccaccatcggctggctcaccgtcgacgagtatcaggacgtctcgcccctgcaacacaggctactgaccctgtggctgggcgggggaggacctgacggcaagagcgcaatgaaccgcaacgtatgcgtcgtgggcgatccggcccagaccatctactcgtttgccggtgcttccagctgggatctgctgcgtttcgccgatgaattcgggccgctcgccgccgatgtcaatctcaacaccgactatcgttcgacgccggaagtcgtgaacctcgccaaccgggtgcttgcggccgcgccgaaccgtgaggattacctgaaactggtttccgcccgtgaatccggtccgcgcgttacccgaaccgcttatgagagcgatatggaagaggcacagggcgtggcggcacgcatagcccggttggttgccaacggggccaagccgtccgattgcgcgatcctcacccgcatcaacgcccaacagccggtattcggtgccgccttgcgcgctgcgagactgaaatatcgcgtccgcaaggattcgggatggcaatcatccgcgctcgccgacgatgccgcgtccaaacgcgcactattggaggcgatgggtttggacgccaccggacttgccgcaaacgacgatctcggggttacgatttccacgatccacgcatccaagggtctggaattcaagcacgtgtttctgatcggctgttcggaagggctcttgccgtatggttcgccggaaacgggggatgcgctggaagaggaacgccggcttatgtatgtgggcatcacccgagctgaggattcgctgcatttgtcgtatgcacggaccaaggatggttatggagcgcagcgcagacgcccatcacgatttttgtgacgggcgtctgtaatgcatactgaatgctcctgaacgttcaggagcgggaattggctgaaggccggttgactatgcctgcgtatcctccgagttgccgttttcaccgtcttcgccatcttcgccgagcagcttggacagttcggcatcccaatcgatatcgccggtcttgccatctgcggcagggtgagaagcggaaccgttggcatcggaagaagaacctgaaggggcgtcggatgacggagacgcgccatctgcgggcttgtcgccaggcagcgaaggcagcagatcgggatgcgtccacttggcgtcacggccttcagggccttcggcggcggtgatcatctcccatatcccggtggcctcgcgcatgcgcttgggacgcagctgcaaaccgagcagactttcgaacgtacgctcggcggggccacccatcgcgcgctcgcggcgcatcatctcacgcaactgttcgatatgaggcagatgggccataccggcgcgccacaccacgcaatccacccagccctcgaccatcgccagcagcgattccagcgaagccagcgcctcgcgctgttcgggagtgtcggggatgccgaccttggtgagattcaccgcgccggaaatcgactccggatccattgacgtggcgtcacgcagctgttcctccatcgcatccagatcgatggagatgccgcgtgcgtacttgccgatgagcgcctcgaaacgcggcatcagccacggtaccgaggcgtacaggcgggcgtgagccatttcctgcagggccaggaaggaaagcacttcagattcggggattttctcggtggtctcgaatccggagagcgcagcctcgaacgcggcggcgtcggcggcatcggcggaagcatcagagccggagacttgggcggtaccgtcagttgccggagtatcgctgttgccggccgaagtgaagccaatgggattggcagaagcgtcggtggatgtggagaacggattgaccgagtcggttgaagtgccggccgtgtcggcctcggccgcagaagcctcaccgttcagcatcttcgcgtattcggtggcgttctgggcaatcagtccaccagccgggttcttcagcaacgcgatgccctgatcgaagctgccatgcacttcatggctcagattgccggccgcatgccccaactgcatggcaaaggacgtgttgcccagcagcttcatcagttgggctgggtctttcataccgtcgggaatcggaatcggcaccggtccggcgaacatgccggcaatctcgccatcgccgaacgcgccgccaagacgctccgaaatcaccgaagccaaagcgtcgttcatcgactcggccacaggagctgcgaacttcgcccactggtcgatggtgccctccacccagccggcgcgggtcagcacatccggatcgccgggcgcgggattgaactcgcaggcggtatccagccacaggttcgcctcactcatcgcgcggcgagccgcctcgccatccacggcggacacgctggatgcagaaccggaggcgttggcctgctgcaaggcaatcgacttggcgagcttgacgttgatcggcccttcctcgacagtgcgctgcatatcgcccatcgtgttgagtccgccggcgctgaacgcggccatcatctgctggacttcggatggattgggcagtcggctggggtcctgactcatcagctgttcacggatctcctcaggcaactggctgatctgctgccaggccatctcaccctgaatggggccgaagcatttgatcagccactcgtgaatcgcgttgtcgtccatgcgtatccttctttgccgcggtgtgttaccccaagtgtagggtctgcccgggcctgttcgcttgtggccgagcaatattttcggtttatgttcgttttcggccgatttcggccctccgcttacactgtagggtatgtttgcacgccacaggaatcaggaaccagacctcgtccaggagcaggagagcccgactgcggattcggaagcgggagatgagcacatgccatcgttcgaagtgaagcatgattcgcgcctatctcgtggaatcagccgtgctcgggcctatgcggccgctcgttcgaaacgccatttcgtcggtgcattcgccgtgttgcttggtgtggtgattctgctgctgcccagcccgtacgtcatcgagatgcccggacccacccagaatgtgctgggcaaagttgaggatggtgcggttatcgacatcactggtaccggcgtgacgacgtataaggattccggcaagctgctgctgaccacggtgaacgcgtccggcgtgcccgggtacccgatcatcaacgcgcaggccgtctggggttggggcaatccgcaggtggaggtcatgccgcgtgaggccacggtaccggtgggccagagtgcggaccagtatcagaagaaagtcgaacaagacatggccggttcccaggattcggccagtgccgtcggtctggcgtatgccaaagcccatgcggacgaactggacattgacgccagtgcattgcaacacgccaaggtgacgatgcacgtggacagcatcggcgggccgtccgcaggcatgatgtacacgctcggtctcatcgacaaactcacccccgccaacgagagcggcggcaagaccatcgccggcaccggcaccatagacaaggacggcaaagtcggcagaatcggcggcatagagctgaagatgcttggcgccaagcgcgatggcgccacatggttcctggcccccgcgtcgaattgtttggatgtggcaggccgcgtgccggatggtctgcgcgacgtcaaggtcgccacgctgaacgaggcgtatcaggcgttggtggccatcggcaaggggcaggccgacgatttgcctcattgcgaggcatgacacgcgcggccagtcgttgtttctggtgagacgactcgcatgggtctgcccacaatgcggcgattttcggccgcgttaacgcatttgttcgcgaagacttgctaatgtgtcccctgtgaatcaaacggcatcacagaacgctgaagaatttggtttcgagcccggcgatatcgtccaggagtggctctgggacgacgacgtggacgattccattcgtgcccagattgaagagctcacgggcgaggatctcgtggacgaggactacgactccgctgtggacggcgtcatcgtatggtggcgcgacggcgatgatgaggacgaattgtccgatacgatcgttgacgcctacgcggtactgggcaatgacggcccgctgtggatactgactcccaagcctggccgcccgggtgccgccagctcgtccaccgtgcagtccgctgcacagaccgccggtatgaacgccgccaccccgctgaccgtcagctcggactggaacggcatccgcctgcgcgcattcggcaagggccgctgataagcctcaatcaatacgcttgactttaagcgtgttgaccggcgtcgtgtgctgcgtagtgctgctgggcgtgactgaatgtcattgcgattgagcgctacggcacgcgtatgcgacaccacgtgtcgcgcagtgctggccatacgctattgttgtcatttgcgggcaattagctcagttggttagagcgccacctttacacggtggatgtcgggggttcgagtccctcattgcccactttcatttttcatcgcttcatggaatcccctcattccacggatataggctgtgacgatattccctgacagtcttcggcaagggttctgaaatctcaatgagatgcgtgcagaaggaaaccggcagtactgctacaaaatcgtgaatttcggtcttcttggtcagatgcgtctcaatagtcacgtaaagttgtggcagagtgtttatatccagcaggaggtcgaatagccgatggcgcaggaacttcgtgaaggggacggcaagtcgggcatcgcacgtgcgggcaagcgcaagtgggggtatgaccccgctcaggtggacgctttcctggagcgcgcccatgctttgtatgacagcgagggcatgaatctcacccagcatgacattcagaacgtgtcctttgatttgcgcaagaacggctatgtgatcgcacaggttgacgccgcgcttggacgtctggaacgtgccgtggtcgataagcagaccacatgggagatcgcacagcacgggcgtgtgacgtggaaggcgaagaccgagaagctgtatcacgaagtccagaaccatgcggagcgtaacgagcgcgaacgcttcaagtccggagcgcccaagcagccttcgtacgataagaagcaggtggatcgtctggtcgaccagattgtggacaaggcggcggccgcattgggcgttgacggcgttaccgaagacgatgtacggtctttggccgatctcaatgcgaatacggtcaacaatgtgatcttcacccagcgcaagggcaagaaaggctatgacgagcgacaggtcgattacttcctgaacgcctgcgtacagttgctgagtcgcttggaatcctatgcccgtgtggccgatttcgtgtccggcgagcctgcggctcctgcccagaccgccacgaacgtgaccgttcaagcgaacggcgtctcaccgttgttcgcttccggaacgcagcgcccggcaactgacgaacgttttgctccggctgccgttgctcatgacgaatcattcgatgccctgcatcaggccgagcagagcttgttcactgctccggctccggttgctcccgcagcgccggccgcggcggcaccgatcgcctatgcgtcggctcctgcatcgttcgatgcttccacaagcaccaatagcaccaatgcggaacagccggtttcctttgctcccgcagcatacccggtgcatgcgtccaacgagtctgcggcgaagcccgtctccgagacgccttccgtggctcctaccgcagttgctgcggctgagcctcccgtcagtgccccgtccgcgccggtttccggtgtgaccgctggcagcgtcccctcgtttgctccggcacaggcagctcacgaacccgcagctccgtcatcgaccccgtcggtgttcgcggaacagcccgtggatatggtgcagaacgattcctctttggccgctctcgcccacatggctgcggtttctcaggaacttccggcagtggatgcaccgtccttcgctcctaagatgcccagccttgatgcaccgaatgcgctgaaattgaatgaggtaccgggttcggtttcatccccggcaccctccgccccggcagtacagcctgtgaatagcactgctgacgaggctgcgtccgctgctatgccggtctcctttgctcccaccagcaagccggatcgtaacacgaactccattccggttcgcgtatccgatagtcagcctgcagacagcacgatctcccgtccggctgcggaatcatctgaatacgttgccgcctcccatgacacggaagcagctcagccgtcacaggataagcacgattccagcgattcgttcccgctgctgttcccgcttggcggtaacttcgattcggatatccccgacctgtcgttccccacactgaacaatgacgatacgaagaaggaacagtgagcatagcctccaactccactgtcatcattctcggatccaccggatccatcggcacccaaggacttgacgtcatctcgcgtcatcctgaacgatttaccgtcaccggtctggcggcgggcggagcacatatcgagctgctggcgcaacaggccgcacagttccatgtgtccgaagtcgcggtgtttgatgagaccaaggttccagcgctgcaagcagctctcgcacaggccggcgcacaaggtgtccgcgtgaccggcggtccggattcggtcatcgccatggccggctccggtgcgaatgtcgtattgaacggcatcaccggctccatcggactcgaaccgtcgatcgcggcgctcaaggccggttcccagctggcattggccaacaaggagtccgtagtcgcgggcgggcatctgctgttcagcgcgcaagtgcgcgagaaccaaatcaacccggtcgattccgagcattccgccatctggcaatccctgcgctccggaacccacgccgaagtcgccaagcttgtggtcaccgcctccggcggaccgttccgcggctggaaacgtgccgacatggagaacatcactcccgagcaggcgctgcatcatccgacgtggaacatggggccggttgtcaccatcaactcctccacactgatgaacaagggcctcgaagtcatcgaggcgtcccgcttgttcaacgtgccgcctgaacgcatcgacgtgaccgtgcacccgcagtccatcgtccattccatggttgaatttgtggacggcgccacgatttgccaagcttcgccgccagacatgcgtctgcccatcgcgctgggtctgtccgcgccggaccgcatgaccaatgtggccgccgcgtgcgactggacgcaagccgcaacttggacctttgaaccgttggacgatgaggcgttccctgccgtgcaactggcccgccactgcctggccgcctccgagaagcatacggcggtgctcaatgctgccaatgaacaggccgtgcatgccttcctcgagcatcgtctgccatacctcggcatcgtggacacggtcaaagccgtgctggaccagatggacgccgagcttcgtggtaacccgctgttcacggacgtggaggaaatgaaccagcttgagcttgaagcccgccgacgcgccgacgacctgataaacaagcaatgatgaataccttgaatacggaaaatcccatcgaaaagccgttccgcaaaaccggtgatccggtcgacctgaccagcgaatcgcccttgcacccgcgccgcaagtcccgccgcatcatggtgggtccggtgccggtgggcgggggagcgcccatctccgtgcagtcgatgaccaacacgctcacggccaacgtacctgccacgttgcagcagatcgccgaactgaccgccgccggctgcgacatcgtgcgcgtggccgtgccgagtcaggacgatgccgacgcactgccggaaatctgccgcaaatcgccgattccggtcatcgccgatatccacttccagtccaaatacgtgttccaggccatcgacgccggctgcgcggccgtgcgcgtgaaccccggcaacatccgtaagttcgacgaagtcggcccggacatctgcaaggccgccaccgacgcaggcatctcgctgcgtatcggtgtgaacgccggctcgctggacaaggaactctacgccaaatacggtggcccgactccggaagcgctggtggcctccgccttgaaggaagcgcacatgttcgaggacgtcggcttccacgatttcaagatctccgtcaaacaccatgacgtcatcaccatggtcgaaacgtaccgactgctcgcttccaagggcgattggccgctgcacctcggcgtcaccgaggccggccctgcttggcaaggcaccatcaaatcctgcctggcgttcggtgcgctcttggccgagggcattggcgacacgattcgcgtgtctctctccgcgccgccggccgaagaggtcaaggtgggttgcaaactcttggaatacatgggattgcgcccccgcaagttcgacatcatctcctgcccgagctgcggccgcgcccaagtggatgtgatccagctcgcctccgccgtcaccgaaggcctgaaggacgtgaccgcgccgatccgagtggccgtcatgggctgcatcgtcaacggtccgggcgaggcacgcgaagccgacctcggcgtggcctccggcaatggcaagggccagatcttcatcaagggcaaggtcatcaagaccgtgcccgaagaccagatcgtcgacacgctgctcaccatagcgaacgatatcgccgcccaaatggaggccgacggtcaagtccccgtcaattccaccggcccggtcgtggtcccaatccagcaccccggtcactgattcggccgaataggccctcggcataaatatcgcggtcagattacaatagcgcacgtgccgcaagaagaagagcatcgcctgactgttcgatccaagccgtggaccagcacccaccggctgatggtcagcctgcccatcttcattatcctgattggcgtgctggtctccatttccaatctgaccacggtgccttggaacatcgaacccaccggccagtcgatggccacgctcaccgacgataccgaagtcaccttcgataacccgtccggagaaacgctgccggcaaaaggcacgtatgaggtcaccgagcgatacatcacgctgaacatgaccagcgacggcaatctgaccaaggagtccggtgctcggggcaaggccaatgcggacggcgtccaagctatcaaggtattgattcgggaacctcagaacgcatcaggcaagcgccccggcgtggtgttcatgcacggtgccggatacggcacctgtgacaactcctttggcgacgtggcctccggtatggcttcggccggctttgtgaccgcagtgctcgacaaacccgtctggaacaccaccgacatcaaccgcgattatccggcctcagccaaggcttatgatcaggtcatcgaatacctgcgagaccaaagcgatgtagacgaggccaaggtcggcatctatgccacctccgaatcgacatggatctcctcgtatctgctcgaggacgatccggacgtcgccttccagattctcctgagcccgatggtgttcagcccacgccaatcactgggatttttcgtcacccaggacttcacccttgttggcgcgaacgaaggctatcaatccatcgtccaacgtgtgttcagcgcggacaccggcctgttcggactgaacaatttcgacctcgccacactcaaacccgccgcctacgccgtacccacctatgtggcttacggttcgaaagacgtgatgacggcgcaggtcgacggtgtgcgtgcgattctctacaacgcccacaaagccgataactggaatgtgaccgtgcgcagctacccggtcgccaaccatgtgctgcgcttgggagatgagtccgaagcgggcaccccgtttgcggacgcctatgtggacgatctcatcgactgggccgtcggcacttccgccggactcacgcagaccagtgaaaaggtggccggcaccaatctgtaccaatcaatcggtctgccgggcgctttgaaggcaagacgcgtcggcaccatttatggtgtgattctgcacgtcacggtggtactgctgctgctcgcatccatcgtgctggcactggtggcgctgggtcgcaaaatcgcggcggatgcccgatggcggcgagagaagcgcgaggccaaacgtgcgggcatgctgataccggaacggcctgtggtactcggtttcgcacatggtttcggcaatgcgctgctgactttgaccctcaccactcttgccacattgctcatcttcttcgccggactcggacaggtgatcatgggcgtggtcaaacttgcatggggtagcgcacctaccgagacgccgggtgtcatgtattggagctggccggtcatccaagtggtgtccgtgctggtgctatgggcttggtcccgcgtctttatgcatctgatagaagtcgcttccgtccgcggcctgattcagataccccctcgtcgcgaatccgttcgagacatcgtcaccggtgctgacccggtactggcctccacccgtctgggccgaatcctgttctggctggtggccttcaccatgctgtacatactgttggtgttcgccttctggggtctgtttatttactgactacttcattgagtagagtctgccaggcgtcgcggggaaaggagatgagatgtcgctgtaccgagacgaaggtgtggtgttgcgcacctccaaactgggcgaggctgatcgtatcatcaccatcctgacgcgtgggcatggcaagattcgggcggtcgccaaaggcgtacgtcgcaccaaatcacgctttggtgccaggctcgagccgttcatgcgagtcgatgtgcttatcgctgaaggccgctcgcttgacgtggtctcccaagctgaagcggtcgccgcttatggtgctccgatcgcggcggattatgcggcgtatgaggccgccaacgtcatcgttgagactatcgataaaatcgccagcaccgaacatgagcagctgccgaaccaatatcggctgctcatcggcgcgttgaacgcgctcgccaaacaatcccacgccccgcaagccataggcgactcctatgtgatgcgcgccttggccttggccggttggacgccacgattgggcacttgcgtggtatgcggcaaggcggagccggcgtacctgtccatcgcgtccggcggtgtgatgtgcgaagccgaccacactaccgatgcgcgccgtatcgcaccgttcgtgttaaaccagttcgatgcactgattcgtggcgattggtcggtgcttgatgccgcgcctgtggagcgggttgtgcaggagttggttgaagattggggggagtattacctcgaacgcccgattcgttcgctgcgcttgatagattcatgagtatggcttttgagaacgttgattacacgtcgttggacattcccgcagctccgttcagcgaccccgctcgtattcccgacttccccaagaacaaggtaccccgccatatcggtgtgattatggacggtaatggtcgttgggccaagcagcgcggcatggtccgcaccaatggccatcaggccgccgaaccggtggtgttcgacactatcgccggtgccatcgaagccggtgtacggtatttgagcctgtacacgttctccactgaaaactggaagcgctcgccacaggaagtgcgcttcctcatgggtttctcgcgtgaaatcatccaccgtcgtgtggaacagatggacgagtggggtgtgcgcgtgcgctggtccggccgtcgccccaagctgtggaagtcggtgatcgacgagcttgaagccgccgaggagcgcaccaagaacaacaaggtcatcgatgtggtgttctgcatcaactatggtggccgtgctgaaatcgccgacgcctgcgccgccatcgctcgcgaagtgcgcgatggcaagatttccggcgaccgtgtgactgagaagatgattgccgaccatctgtacaatccggacattcccgattgcgacttggtgatccgtacttccggcgaacagcgcacctccaacttcctgccgtgggaggccgcctacgccgagctcgacttcgtgcccgaacttttcccggactgcggccgtgacgtgctatggcgctccatcgaccattacatccaccgcgatcgccgattcggcggtgtgaaatagtccttgttaggccccctctgacgggctgagccgtaaagcaaacgcccggtggactgtttgtaggcgaagtcgagacgagagtcgagccagaagaatgcgagcggcagcttgtccgtaattgcggtcgagctgcccgtgtagcggactgaggggagttaccggcacacctcagccatcctctctacaaactcatccaaaaaacgtcccgaatccacaccaagtgccacatgcacatgcggcatggaatgattcaccagcccaaccgggtctccggtggtccggcctcgtactccattgaaatcaccggtattggtctccgcgcgcaacgcaagatcaaaacaatcgaccagtgaagaatcaagtgcaaccgccgccgccaacggatcatgcaacggcatgccgccagagaacagtgcggggtcggcttccaaatttgccttgatggaaaagtccgcgagatcggccaagaaccgcccgcgcttggtccccgtcgcacgccaccggtcggccgccgattgcggtagcaaacactggtgagtcacatcaagtcccaccattgtgatgtctgcgccggaatgaaatacacgattcgcggcctcagggtcttggatgatattcgtctcagctaccgcatcccaacaattaccgggttgggtaagcgtaccgcccatcatcaccagcctgagtttcgatgcaatatccggtgctcgagtaatagccgcatccacatccgtcaacggcccggtagccagcacggtaacgtctcggccaaactcgcgaacctgctcaatcagatactcaatcccatccgcagcatcaacggagcatctccttttgcccccgctggcgagagctgtcggcatagccgactgggggtggcccaccgaccgagagcggttcacacgagaacaagcacccaacgccggatgagcatgaacatcccccgccaaatacccgccaacagaaacaacctcatcgggcacatccacagacatatcatcaccagacatatcatcaccaggcacacaagctccatcagccagagccccggaccctgccagccgagtattccccagtccatcatccccatggaactgggcacaccctgcatcaggaataaacgcatcagcccaagaaggatgctcagaccctaaaaacactggaatatccgcccgaccaaacaaatcaagcaccgcgcaagtattggcataagccgtgttcgcatccacattgccataaccggcaatcacgccacccaactcgcactcatccgccgaccccaacaaatacgccaacgccaacgcatcatcaacacccgtatccatgctggcaataatgcggtcaggacattggaccatagaatcgtctccttgttagcgtgatccgctatgaataaccttatcggtcgatacgcaaaaatgcgtcctttcctcatgggaaggacgcatttttgcgtagattcaaactcggaatatcggaaattacttgccgatgaattcgtcggtggcaaggtccttggcctgcggggcctcatgaattatcttgtcatgactgtcggtgtatgcgtcttcttcagccaggaagtcgaagtattcctgagcgcccttgaagtcgttggtgccgagcacgaaagaaccgtccttgatcttggccggatcgccccagtactggccgtcgacgataacctgcatgctcttcttgacgaattcgggcttgaggttggcgtcaggggcttcgtccacgagaatctgcgcggcgtcatccgggttggcgtacgcgtactcgtaacccttttgagtggcctgagtgaacttcttgaccaggtcgggattgttcttgatggtcttgtcgttggtgatgatgccgatggtgtcggcgttgccgggcacgccatagtcaggctcggtgaagcagttgagcttcgggccgtacatgtcggcttgcacgccttcccacgtggcgtagaagcctccgaaatcggccttgccggattccatggtctggaaggtggaggtgccgacggtcaccttgtcgaattcgcccttgccgccatcggtttggaccatgcggcgcaccacggcatcggactcgttggagccgaaggtggcgaaggtcttgccatccaaatccttaggggacttgacggcggtgttggacgccagtgcgcaccaaatggcgctcggcttctgctgcacctgcagcacctgcttgatgtgagcgcccttcagcgtgtagacgcccacgttggtcaggttggacagggcgaagtcggccacaccgttgttcacggcctgttcggcaccggcctgggccacggccacgatatccacgtcaaggccggcgtccttgaagtagcccttgttcttggccacgtacacgccgatgtggttggtatcgggtgcccaggaaagcatgaaagtgaccttcttgaggtcggaggtgttggagttggaggagtcggcggtgttggtctggccacatgcggcgaaaccgaaagtcatggcaagggcgcccacgagggcagcggccttggatacaaggcttttcttcataatgatggttccctaattcgttgtctctctatcgttctctgggattgcttcgaacggaagtcggcagaaaacgatatggagggccttgatttccgttcgaccagcgcccccgacattccctatgaaagctcgggaaagccggtttgccacacgctggtaaagctgttccattatagagacagggttggagacctcatgagaagccgcgcgttcagtcggtcctggctgccggctcgtgcctttgacggtaaaaaagaactactggtccgcgtcggggtcttcgtcgtcgccggccgggccgagcaggatgcgctcgctggcgtttaccgccagcatcagtacgcatgtcatcaggataatgacgatggtggcggagaagatcagcggcgtgcggaatgaattgtaggcagcctgcagccagatgccaaggcccttgcgtgcgccaaggtattcagcggtggatgccgtggcgaagatgtatgcggcagatactcggataccgccatagatctgacgtgcggcaacgcgcagcttcacgtgccagagcgtccagaccggggtcgcgccgcaggtcaatgcgacgtcggaatagaactggggcactgcttctagtccgcgcacagtctgcacggcgatggggaagaggccgaataccgccacgattacgattttgccggaaatctcaaaaccgaaccaaatcaggaacaacggggcgatggaaatcagcggcatggtttgtgcggcggcaagcagcggatagaacgccgcgttgaacgtgtgcgagcagtacagtgcaatgccgatcataatgccgaagaacacggcaaacaggaagccgaccacgccctcatagccggtgattgccgcggccgggccgagcgtgttccatgtttcgatggtggcggcgaaaatctcgcttggcgcggagatcatcgtgggggagacatgtcctagatccacccacgtttcccagactgccagcaatacgatgacggcgatgacggtgggcatgcggcgcttgaggcgcttggcgatggacatgggatgtcaccttgctttccgcgccagtccggtttgctggtggcgcttgcggccggggcgtggaacagtaaggtgaggagcctgcgcgcctgccggtcgtgtgatggatcgtgttatatgccgtccatcagtataggcgaaggcgaacgacagggcgcacaaaaaaacctccctcgtcagagggaggtgagagagctactccagtccgatggacttcatgtggtggagcttcagggaatccaccttgagactaccggactcggcgacgagcttgatggcgcgcgggccttcggaggcgtaggagtaggagctcagcacttggtggccaccgttgacgtagacctccacggagccgcgatccacgaacacgcgcaggtccagcttgccggaggccagttcggcgtcggtcagtggggcggcgcggtagccgcgatcgccgttggccatggcctgacgatccaccaccacgcggccgatctggtcgtcataagccacgtaggtgtaggcaccgtcctcagtggcgtgaatcttcagacccgcacgctcggcagtggaggcagccaagtcgatggtcatttcgatttccacggcctcggcgtcgtcggcgatgatctgctcgccatccatgtcgagtgtgatcgaaccatggtcgagggtatcctcgcgcaggccttccatttcggcgaccggcgcggtgaccacgtcgccgtcatcaccaagagtgatctcgcgcggcagggtgagctggccacaccagccgtcatcctccatgggaatcggctgcacgaacgggctcatccagccatagacgatctgacggccgtccacattgaaggactgcggggcgtagtagttgtggccgcaatcccacaggcggaactcggtttccggcttgaattcgccgcccggctcccacgtgccgatcatgtagccggcgttgctgacgttgcggttcatgaagccgctgggcttggaccccatggcggagaagccaatgacccacttctcgttgccgtccttgtctttgatggggaagaagtcggggcattcgagcatgaacacatccggatccgggtgctggaagagcacgcgctcgtattcccagcggaccatgtccttggaggagaacagccacatctggccgcgcttgtccgcagaggagacaccgaaggtcatgtaccaggtgtcgccggtcttccagaccttcgggtcgcggtagtggtggtcgaccttgtcggtcgggcagtcgatgatcatgccctgcttggtggcggaggtgagctcgtcattgtccggcagcgcggtcatctgcacttgccagtcgccgccggtgttgtcgtggccgttggcccaacggtggccggtgtagtagaagcgaaggtctccgttgtcgtcgatgacggcagaaccggagaacacgccgtccttctcctgctctagagacggtgcgaacatgatgggctcgcgcttccagttgagcatatcggtggaggagacgtggccccagtgcatcggaccccactgggtgccgtaggggtgcagctggtagaacacgtgccagcggcccttgtagaagcacaggccgttcgggtcgttgatccagccaccgttggaggcgatgtgatacttcgggtaccagcggttgttgcgattggcggccatctcagccacgccggcttcggcttttgccagttcagcagcgtggtcgtggatgggggtgagaacaggggtttcaggagtgaagtcagtcatggctgtcctttcaggccttggcggcttccatctggcgaagctgcttgtcggtgtagaacgggtcgccgccgacttcctgatcatcatgcttgatgacgaagaagccgtaaatcagtgcgcacagcacgatggcagagatgacccagaaggtcacgcgggatcccatgtcgttgttcggcagaatctgagccatcttgtcgtggaaggcacccagaggggtcgagaagatgacctgacccacttgggaagcgatctggaagcccaccatgtacagcgtggcagagagcttggtgtcgaagtgcagagtgaagtagcggaatgccggcaggcagaacagcggcacttcgatggagtggaacagcttgacgatggagatggtgaccgggtcgtggaacacgccgcacaagccgatgcgcaggaacatcacggtagcgccgagcagcagagcgttgcgcacgccgatcttcttcatgatgatcgggaccacgcccatcattgcggactcaaggaagacctggaaaccgttcagggtgccgtaggtggcgttgccgatttcttcagtggggaagaggttggcgtagtaggtcgggaacatctgctgatcgaacacggtgtagaaggtgttggtcagcagcatgaagacgatgagcacccacagggtcggcatcttgagaacggcgaccatttccttgagggacgggttggtgggggctgcgttcgggtcggtttccttcttgagctcttccttctgctcggccgggacccagaaggcgtacacgaggagcatgccagggccgaatgcggagccgacccagaagttgatcagcgggttgatgttgaacaggaagccggcgcacagcgccacgatggcgtaaccgaaggagccccaagcacgggactggccatattcgaaaccgaatttacgggagtagcgttcggtgacggcctcgaacagggagcagccggacatgaagccggcagacagaacgatggagccgatgagtgcgccgatccagcgggtggtgccaccggcgaggatcatcggggcgtaaacgaattggacgaatgggccaacgcaggcggcgattaccgagactacgatgacgagcttgcgcttgatgccgagctgatcctgaatcacgccgtacacaaacatgatgaccagggtggccagcgagttgatggagtagatggtgccgacttcagcattggtcaatccaacgcctgagatgagccagcgctggaagaaggaccaccagatgccccaggagcagaagaacatgaagatgccgaaagagctctgcagataggaaggattcttccatgcagacttggttgcacttgccataatcatcctttgattactacttggttggttattggttatgtaacgcttctgctcgggcggccgtgcctttgtagaagttgttatgtagtaattattatgcgacgtcaatcgatttacgtcaatcgattgacgtaaatcggcgtgtcgtacctgttcgacacgcaaaaaggcctccgtgctggacggaggccttgagaaatcgtgtgggactcggctacttcaccgaggtcttttcgatcagcgtgcagtggatcttcgccggaatcggcgcgtcaatcggcggcaggggagcggtggtcgctggccatgagacgtcgtccatcgagcgtccttcgataatcgacaccagcttggccacggcccagtagcccatctcgaaatgtggcagttccacagtggtgagcatcggttccagcgtttcggcgaacacgcgatggttgtccacgccgaccacggagatgtccttgccgaccgtgagtcctcggcgtgcggcgcattcgtacacataccaggcgcgggcatcgttgaagcagaagaatccgtccggatgctcggcatcgaacaaatcgctgactgcggtcagtgccggcccgttgttgagcacattgacgaccagatgatcgtcatagtcgaggccggcgtccctgagcgccgcctgatagccttccaaacgatcgtcctgcgcaatcagcggctccaagcaacccacataggcgatacgtgcgcatccggccttaaccaatctggtggtggcgtcgtagccgatttggaactcgtccggttccacgctcgggattttgccaagcgagtcggtggcatccaccaacaccagtggcgtcttggccagcgaggaaggcacatgggtgatgcggttcgacatcttggcgtacagaaagccgtcggtgccgtatcgcttgagtgcggcgatttcctcgctctcgctgttctcgccgtcggtgctcacggtgatgagcatatagccgaactggcttgcagcggtctgcgcgcccagaatcataccgccggcgtacggggtggtggccacctcctcactgatgaaaccgaggatgtgcgtcctgcctgtacgcagcgaactggccagcggattcgactggtagccgagcttggtggcgatggcgcgcacattgtccgcaattttggactttacgcgcccctcgtcgcgtccgttgagcaccagcgataccgtagagacggaaacccccgccttgttcgcgatttccttcatcgtaaccatgcgtcaaacgatacaccctaattgacggactgccaggaaagtatcagttttctccaccgactccgccgaggttgcgcaccgcaccgatgaataatggtatgccgtccggggtgacgtacgaatacagaaatgggcgatccaccgtgaactcgacgttgtccaccggcgcgctaacggagtctgcgccgaccttggtgaaggacatggccttggcgccggcttcgttcacctcgatgcgcgtgccttgcagaatcgagccgatatacaggttctcgccgtgcgaaccggtgtcgatcatcttggtgaagtcggcgtcgcctgcactgaacgcatcggtcacccccagtttttcgaatgccttgatggtggcttccgagtcgaacatgctgtcgatggtgaatcgcggtagcgtgacgttcaccatgaccgagttgacggagacgccccagccgggcatactgtccgcggcgcaacccattgcgccctcgccaagggatgccgtcgagcatgtaccgaacgcccaactgagcttctcggcatcgccggccaactcgtcgaaatgcccttcggccggcagcacgatggccagattgccgccgttgtcgaacggaatctccacccgctgccaagtgttgtactcatcatgtccgtaagccatttggctgaaggtctggtgcatcatcggcacctgagcatctccggcttcgccgtggaaggtgccgttgccggtggactgctcttcgaacggatccttccagcggccatccgcatagacggtgttgatgatggacaggacttcacggtcacgcagcgtgatcttcggcttgagcgaaccattcgtatgcttggcaatccaatcggacatcttggcggcggcctgatcgtcgaacggtaacgtggtgacttcggcctcgaacatcttcttgacggtggattggtaatcgctggcaagagagtagtcgtcatcaatccacagcgagttcgcggcgctcatctcggatttcgcccccgaatattgcccgttgatcgaacttagcagcgattggtagtcgctatcggtcagcgaaccggagcccagcagttcgttcagttgcgagcgggtcgtgccattggcgccctgcgcggcgatggccaacgccatccacatcgaagcaggagagtagttcacattgccggtgcctcggtcgccggcttccatcgccaggaattccggtgcggtgcggtaggcgaaggttgcggtgctgttgactaccggctgcgtggcaggcgtggccttcggcttgaacatattgcgaaccaatgcgctgccatcgccggccgtccaccatacgccgccggcgacggcaaggacaagcactactgtcacgatggcggcgatacaagcgttacggcatttgcgttgtccgcgcaaccggtactgttccatcagttgctcgctcatggttggcccctttgcttggatcggctcgtgcatcattgcacgaaatcgctgttttcattatattgcggctttcccttgagcccaggaacggtatgggaaccccggccgtaagcgaagattggtccagccgaatgccagtggtccgatgattgcgctcgccaacgggaaagacagactgccggatcgtgtcgaaccgagtatcaagttggtgatttccaacaccaatggccagtgcagaaccataccggggaaccatacgaacaggtttttggcagccctgtcaagaacctcgtcgggcatgagatacattgatgagctccactgcagtagcagcaacaccgctatcagtacaaccatgccaatccaatgcgcgcggttccatgtgaacagtcgttgcatcccgcgctcggcggcggcattgcgcatatcgctcctgttgagcttgctgagtgcttgtgcacggttcattgccgtcctcctttaccgccttgtcaaggattgatgatgattccatcgtaaatcacgcaggaaatgtggaatgatagttgtcatagtgaccatgacatgtcaggacggagcagttcggcgtcgggcacactgaaggggtgaatgtaatgggagaagcgcgcaaccgcaacatactcatcggcattgtggacaatgacccatatgcgctgaaagtgttcggcgcgctaatcgaacgtatgtccagcgattttgccgtgatatagacctgcgatttgggtgccgtggccatcagccgatgcctgagccccaccaagcggcctgacgtgctggttacggatatgtctatgggcgcattggatcgcacgcatcaagtcattgatgtgattgaaggcaggggagaagcggcgcacagtgcagtgactccgcatgattcgaccgttgatgccgctcctggcattgcatgtgacatcacagacgctgattgtccgctggagacgcagacctatccaccggcaccggcctcaaccgttaccgacaattactagaacaacaaaacggcgccctgcatatcaccacgcaagacgccgaatggacatcatcagcagttattccactgtgaggaaaccgatcacccaaccgacttctgcgcagtctccgcgccaaagaagccgacaatcagcatcgatgcaatagcaatcgcgctgatggccacaaagatggacgtgacaccaagcgaggtaagcatccagcccaccaccatcggcatcaacacattgagcagcttggccacggcgttcgcgaagccgacgcaacggaagcgaaccttggtggcgaacagttccggagcgtacacagccaccacggaagccataagcacgtacaggcacatcatgagcaggaagccaacgataattgcgctcacggtagaggtctggaaggcatacattaaaccgaacacgccagtgaacaggaaggccggcacaatcgtgcgcttgcggccgatgcggtcgataagcagagagccaatcaggcagccgaccggggcgccgagcatcatcgccgtggaggtgagcagcgagctggacaggttaataccacgcttgaccagaatcgtcggaacccaagaagtgaaggcgtaggagcacacgttcgtggcggccacagcaaccacagccacaagcaggcagatgccgagcgaacggccgccggcgttgcgggtgtcgctggtgtcggccttggcggctgcgtcgatcggttcggagccgttggcctcaagctgcttgacgatggcgtcggcctcatcgtaacggccgtgcacggcgagccaacgcggggattcggggatgtcgcggcgcagccaccagatgatggcggcccccagaccgatggccacgaacagcggacgccaggaccagcgggggatgatccatgcgcacagcagcatagcgattggcacaccgcagttggccacgagcgagacaatcgcgcaccagtggccacggcggttcatcggtgcgaactcgttgaccatggcgaagccggtgacgatttcagcgccgaggcccaggccggcacccagacggcacagggacagcacggccatgttcggggcgaatgcgccgaggaaggtgaagccgccaaacagcaacaggttgatttggtaagccacgcggcggcccttcaggtcaccgacgaagccggccagcagcgaaccgaccagcagacccaggaagcctgcggacataaaggtggaattttgcgcaacggtggaccagtgggtagccaacgcgctggaggcgacggcgctgccaatatatacgtcgatgctgtccatcagcatgccagcggcgaccagcgtcacgatgcgatggaacatcggggtttcatgtgcgcgatccatgcgcgagataatatcctgaaccttggcttgatccgtcacggtggtacgtgcttgtgcgttttccatagccgcgggattgccggaaatctgctgttcagcagcagtcatatttgagccctcttcttgcaaacctgcccgcgtgcaactgctcaatggtgttgcggcgagcgaactcttgattggactgtgtgttccgttcgccctcccattgtgtgggatgaacgacgtttgcggtccaagtcttgaattctacgtagcgagccaatcgttgtgagatagctcactacatggggcttaactataggttcgattttgtggcacgccgcgttgcggtcacatcgtgaacgataacagaggttgtaacgctcctatatatgccccacttacgctcttaccccgtcgaaagaaggcagaaccgtgattcccatggggcggtaagacactcatggggcggtatttggcccatggggcggtatttggcccatggggcggttagcggattttgcctttccgcagaatagagccgttttcgactaccgccccatgagggttttaccaccccatgggtgagctaccgccccatgaaacgtgtaataacaaagcatgcccttgctggtggaagcgatgctttgctacttcgcctgcttgtcggcgaggatctcatccaccagcttgggcttttcggtcagctggccggtgaagccggggcggatatccatgtgcagcaccagagaagtgcggtagccctgctcggcgagcttcttggcggcctcaccggccaccttgagcacgtcgtccagatcgccttccacgttggtgaacagggcgttggtttcctgcggcaggccggattcgcgaatcacctcgacggcctgagccacgtatggcgaaacctcggagcccacgccattggccgacacctgaatggcggccacggtattgaggtacggtttgccggtttccgggtcgatcggcacttcctgagtaacggcattacggtcaataatcataattctccttttattacttggctcccctcagagaggagagccagtaggactcagcgatacttccagaaatgatccatcgggccggagccgtggccaagattcagctgggccttcagtgcaccggtcagatacttcttcgcatgcttgatggccttgggcaatgtgtcgccaagcgccagatacgaggcgatggcggagctcagcgtgcatccggtgccgtgcgtgttcggattattgatacgcgcgccatcaaaccaggtcacggttccatccgtctcggcaagcacatcgttggcatcctcggtgccatgaccacccttgaccagcgcggcacagccataacgctccacgaggcggtgggcggcggcctccatatcctcctgatcgcgaatcagcgtatcggtcagcacttcggcctcgggaatgttcggagtcacgaccgtggccatcgggaacagcttgccggtcaaggccgcaatggcatcgtcactgatgagattggcgccggaagtggccaccataaccgggtcgagcacgatgttcgtggcgtgatggaaggtgagtcgttcagcgatgacgtcgatgatgtcagtggcagacaccatgccgattttcaccgcgaccggcggaatatcctcaaacaccatgttgatctggtcggcgagaatgtccggtttggtgtcctgaatggaacgcacgccggtggtgttctgtgcggtgagcgcggtgatggcgctcatgccgaacacgccgcaggccagcatggtcttcagatcggcctgcatgccggcaccgccggacgagtcggagccggagatcgcgagaacagcgggaagtgtagatgttgcaatttgtgccatagtgttcattctaagtggggcccatgatgtttttcggagcggttttccttgatgttttgccgctcctgtggtgagacggggaaggtttgctgattgcgattgattcatgaaatgttcgggaggaggcatggctgataacgatgtactgcgccgtgacggcgtcttggtgcgcatcaccggaacgcaccgcatattttggcgtaatgcctaacggacacaccacacagctcacatttccgcgtcaggaagtgttcgatgtgggcgacgtgttgctcgtcggtacggatttctatcgcaaagtgccgcatgatgtgtggccgttgaagccccgtgtgggcatcgtgcgccgtgcgctcaacgaaggcgtggtcctggagacttccgacggcctcggtccagatggcgcacacttcggcaccgccttcgagcgagtcgagcgtcgtcccgaattaagacaccaccgggcataataattggctcccctcagagaggggagccagagaggtttactcctgggcggtggagtagagcttgccgccctgggcggtgtacttttcgctcatcgcatccatgccggcgaggatttcttcggggctgagcacgttggcggacaccacgccgttatcgacattggccttggccgtagccagtgcctcggagtcgatgcctgcagcagcctccttcacgatttgctgctgagcggcctcgccaccgaatgccttgcggatgttctgggagatggccatcgagcagaacttcgggccgcacatcgagcagaagtgcgccatcttggccggctcggcgggcagggtatcgtcgtggaaggcgatggcggtgtccggatcgtaggacagattgaactggtcgagccaacggaactcgaagcgagccttggaaatcgcattgtcgcgatccatcgcgtgcgggtggtgcttggcgatgtctgcggcgtggcaggcgatcttgtaggcaatcacgccctgcttcacatcatccttgttcggcaggccgaggtgttccttcggggtcacgtagcacagcatagcggtgccgtaacgaccgatctcggtggcgccgatagcggaggtgatgtgatcgtaacccggagcggtatcggtggtcagcggtccgagggtgtagaacggggcgttgtggcacacggccttctccagctcgatgttcatgcgtacggtgtcgaacggcacgtggcccgggccctcgatcatcacctgcacgtccttggcccaggcgcgctcggtcagctcgcccagagtcatgagctcggaaagctgcgcggcgtcgttcgcgtcggctagggagccggggcgcaggccatcgcccagagagaacgccacgtcgtacttggcgaagatgtcgcacagctcgtcgaagtgcgtgtacaggaagctctcctggtggtggcgcaggcaccagtcggccatgatggagccaccgcgggagacgatgccggtcacgcggttggcggtcagcggcacgtaacgcagcagcacgccggcgtggatggtcatgtaatccacaccttgctcgcactgttcgattacggtgtcgcggaacagttcccagctcagcttggaggcatcatcctcgaccttttcgagggcctggtacatcggcacggtgccgatcggcacgggggagttgcgaagaatccactcacgggtggtatggatgtcgttaccggtggacaggtccatcacggtatcggcgccccacttggtggcccacgtcagcttctccacttcctcatcgatggaggaggtgacggccgagttgcccatgttggcgttgagcttggtcaggaaggcggatccgataatcatcggctcggcctcggggtggttgatgttgcaaggcatcaccgcgcggccggcggccagctcggagcgcacgagctccacatcgcagttctcgcgggtggccacgtactgcatctccggggtgatgatgccgtggcgggcgtaccacatctgggtgatcgggtggtccttggcacgcatcggctcatgcttgcgtccacgccattccttggtggcgcggccgcgcttgatggcgcgcttgccatcgtcctcaaggttgcggcggcggccctcgtagtcttcgatgtcgccgcggtcgcggatccagtcgagacgcaggggcttcaagccttccttcgggtcgcacttggggccttcggtgttgtagtcgtggaacggcgggttcgggcccacgccgggcgtgtcgctcagcttgatttcggtgtacggcacttccaggtcgtaggaaccatactgataggtgaacggtacggacttggtcttgcggatgtgcgccttgtcgcgctgcttggaaccacgggcggcgatgtccacgcgctgctgcttggcaagcttctgggcatccttggcgtccttggcgttggtgaacttcttctcagtggcctcggaaccgggcttcgcggccccttcctgagcagcctgagtgtcagtagcgggggtgtgggttacgacgcgcggagcgtagccgtgcttcttgtcgccgcggacggccttccagccttcgaccatggtgcgcgcggcctcttccgggttctcggcacccgcgatggcggagaccacgaaccagccagcagccttggtatcggcgagcatggccatatcggctgcggtcacgccgccgcccacgaccaccgggaattcgctggcaacgcagatggtgttgatctgggcggcgtccagcgtcttgccggagccgtcgttgccgcccacggaagcctcgggcttggtggtggagacgtgcagaggaccggcgccaatgtagtcgatgcagccgtcgggcagctcgttgatgagccgaacgaggctttcggtctcagccgacaggcccacgatggcctcgtcgccgagcagggcgcgggcttcgcgcggctccatgtcggtctggccgatgtgcacaccgtccaccttgatgcccttgcggcgggcctgccacaccacgtcggcacggtcgtcgatcacaaaggccacggaatcggacttctcattgtcctcgatgatttgcgcgatgtcgcgagccatgtcggtcagctcagaggcatcggcctccttggcgcgcagttggatgaaggttgcgccgccgtgcagagcctgatccaccacgtcggtcagcggacggcctttgcagtcctccggccccaccacgaagtacgcggacaggtcgaagctgtcgcgcatggaggcgtatgggtattcattactcattattattcctgcttttgttgtttcttgtggaagtcttattggaaaaaactgttatgagctccctcatcagagggaactgaaactactgcaccaaaatctcggattccgccacctgttcggcggtcacattccacagcgcgtcaaggaacgcaacttggaacgagcccggtccgtgcgaagttgtatcggccacctctcccgcgcggttgtacagcagagacgcggacagggcggcggtcaacggatcggagaccgccaaatacgtggcagccacgccgcccagcgagcagccggcaccgatgatcttggtcatcatcgcgctgccgcccggcagtcggtacacggtttcgccatcggtcaccagatcggcgatgccggacacggccacggcgcagcgggtggaagcgtcatgggaggaatgcttggcgtgctgttcggtcagatactgtgccagcgccaccgccgcgccggttgcggactccacgtcgtcgacggattccactccggcggggcggtgctcggaagcgtcccccacggtttcggtattgagcccccacatgttcgccagcgcgattacctcggatgcattcgcgcgaatcatggtcgggggagcggccttgaaggcctgaagaatggcggtacgggtgcggccgatgccggcggccaccgggtcgagcacccacggcttgtccaagtagttgagtcgctgggcgatttcgggcagtgcgtccttatagaacggcagcagcgtgcccacgttgatgtagttcgcgcccgcgattttcgcggtttcgatcacgtcgtccggcaggaaactcatggccgcagtgccgccggccgccagttgcgcgttggcaaccaaattgatggtcacaaaattggtgaatgactgggccaacggagtcgtctcgcgtacgcggcgaacggcatcggcgatattgtcacggatgggtgaatcggctggaaccggagtcccggcggtataaccgctggacacgccggtaaacgatgatgcactattgctcatttactgctccctacgatggtcttaaccaacaggttctaagggtcaggctcaggcctttctcaactcgcgaaccacatgcgagttcccctgcattacagtgccgacgctatgcgccaacatggacattatcgtgacggatttgttcgatacgtgtcgtcaggtctggcgcgtccccgtccattcgtgatacatagacgcctccgccgagcaacatctcccgaatttgtgacgctgacgcgatgtcagtggcacaaattcgggaagggtaaaacaacaggaacaatatggaggtgttgcgatataggaatcgctgcgaacggccgctcgtgagacgcggaacatataccggacaatgccgcctgacctgtcaccatatacggctatcctgaagcggttgttattagaccccaaaccgttcaaaccagaaggtgcattgtggctcagtccaaactcgatgaagtcgtatcccttgcgaagcgtcgcggcttcgtgttccccgccggcgaaatttacggcggcacccgttccgcttgggattacggccctctcggcgtcgctctcaaggacaatatcaagcgtgaatggtggcgctccatggtcgtcacccgtcctgatgtcgtcggtgtcgacacttccatcattctgccgcccgaagtgtgggtggcgtccggccacgtgagcgtgttcaacgatccgctcgtcgagtgtctcaactgccacaagcgcaaccgcgccgacaagctcgaggaatcctacgccgagaagcacggcgacaagatgccggaaaacggcatgaaggacatcgtctgcccgaactgcggcatccgtggccagtggaccgaaccgcgcgacttcaacatgatgctgcgcacccacctcggcccggtcgaggacgagaacagcctgcactacctgcgtccggagactgcacagggcatcttcgtggacttcaagaacgtgatgacctcttcccgttccaggccgccgttcggcatcgccaacatgggtaagtccttccgtaacgagatcaccccgggtaacttcatcttccgcacccgtgagttcgagcagatggagatggagttcttcgtcacgcccggcaccgatgaggaatggcaccagtactggatcgacgcccgcacccgctggtacatcgacctcggcgtcaagccggagaacctgcgccactacgagcatccgaaggagaagctctcccactactccaagcgcaccgtggacatcgaatacaagttcggcttccagggttccgactggggcgagctcgaaggcatcgccaaccgtaccgattacgatttgagcgcgcactccaagcactccggcgaagacctgagctacttcaaccaggccaccggcgagaagtacgtgccgtacgtcatcgaaccggccgccggcctgacccgctccctgatgtgcttcctcgtggacgcctacgatgtggacgaggccccgaacaccaagggcggcgttgacaagcgcaccgtgctgcgtctcgacccgcgtctggccccggtcaaggccgccgtgctgccgctgagcaagaagcctgaactgcagaccgtggcccagaacctggccgacgacctgcgcttcaacgagtggatgatcgactacgacgagtccggtgccatcggtcgtcgttaccgtcgtcaggacgagatcggcaccccgctgtgcatcaccgtggacttcgacaccctcgaggaccacgctgtgaccatccgtgagcgtgacaccatggcccaggagcgcgtcgctcttgacaaggtggccgattacgtggccgcccgcatcggcgagaagcgcacccgcgtgcccctgaagcctgtggaaatgggcggtgagccttggcctgagtccggcgttcaggaagccggcggcctgtactaagccggagtcgcacaacttgggctcccctctgtgggctgagccgtaaggaagacatcccagtgggctgtttgtaggcgaagtggcggcgatagacgccggggctcctctctcaggggagcccctacttattttcttaggaatcacatggcacaatccgaatccgaaacagtgctcaccgagcatcacgagaccgacaacctcgacccacgtacggacgcgccggcgcgccccgggaccccggtgcatatcgccccggtccaactcggcaacatcaccgtgccgaccccggtggtgctctcgccgatggcgggagtgaccaactggcccttccgcgtgatttgcgaggaatatggtcccgatggactctacgtggccgagatgatcaccgctcgagccctcgtggcgcataacccgaaagcactgcgcctctgtcatttcgccaaaagcgaaaaaatccgttcactgcagttgtacggcgtgaacccctccatcaccgaacaggcggcgaaaatcgtggtcgacggcaacatggccgaccatgtggatctgaacttcggttgcccggtgcccaaggtcactcgtcgaggcggtggttcggccttgccttggaaaaccgacattttcactgagctattacagcgcgtggtcgccgtatgcgagccggcgggcatccccgtcaccgcgaagatccgcgtcggcatcgaccataaccatgagaccttcctcgaagccggacacatcgcgcaggaggagggctgcaaggccgtaaccctgcatgcccgtaccaccgccgaatactatggcggtcattccgactggtcccgcatcggcgagctcaaggaacacctcaacattccggtattcggcaatggcgatatctggggtgccgaggatgcgctcgaaatggtgcgcgagaccggctgcgacggtgtggccatcggccgcggatgccagggccggccgtggctgttcgccaacatcaaaaacgccttcgagggcaatcccgaacggctcaacccgaatctgggcgaggtctgccgcgtgattcaccgtcatgccgagctgcttaccgagttttatgagggcgatgagatgatggccgtccacgatctgcgcaagcacatcgcctggtatctgaaaggattcccggtgggcggctccacccgcaaggcctttatggaatgcgagagcctggccgatgtggaccgcgagatcggcaagctcgacccgactatcgaatacccgccacgcgtggtcgacaaaccgcgcggccgcgtgcgtttcgccaagaaggtgcacttgccgtatggctggttggaatcgcgtaccaccacccacgaagagcgtgaggcgctcttcggtgacgacccaatggacgccagttactgagaaaatactgaaaatacacgcaacacgcgccattctgcgcgtgaatttccctccaagagtagcctgtttgcgctactcttgggtgtaaccgtgaagtgacaggagccaaacgtgagcgagatcgcgcagaatgagttcaacgacaagaccaacatcaaggttgttggcgtcggcggtgccggcggtaatgccgtcaatcgcatgattgccgagggattacagaatgttgaatttgtggcggtaaataccgatgcgaaggatcttctgcgctctgatgcggatgtcaagatttccctttccgataagtccagtcgtggtctcggtgctggtgccgacccggagcgtggagccaaggcggcccaggaccaccagtcggatatcgaagaggcgcttaggggtgccgacatggtgttcgtcacctgcggcgagggcggtggcaccggtactggcgccagcccgatcgtcgctcgtgcggctcatcaacagggtgctctcaccatcgcggttgttactcgtccgttcagcttcgaaggccctcagcgttccgcttccgccgaatacggcatcgacaacctgcgcaaggaagtcgacgcgctgatcgtcattccgaacgatcgcctgctcgagctttccgaccgttccatcggcatcattgaggccttcaagaccgctgataccgcactgcttgccggtgttcagggcatcactgacctgatttcgatgaactcctatattcacgtcgacttcaacgatgtgaactccattcttcgtggtgctggtactgcgctgtttggtatcggttccgcacggggagaggatcgtgccacgcaggccgccgaaatcgccatcagctctccgctgcttgaggaaagcatcgaaggcgcacacggtgcgctgatcaacatcgccggtccgaccgacctgaagttgcaggaggcctctgctgccaccgaactggtgcgcaaggcgattcaccctgaagcccagattatttggggtcttgctctggacgatgcttatggcgatgaagtgcgtgtcactgttattgctgctggttttgaccccgtcgccgctcaagatgacgacactcagagcacggtgacgccggttgtgccaaccgccgccgatcctgcgactcccgtggcacagccagctccagcaccggcaccggctgcacagcccgctgccactgcccaaccggcattcacaccggctatcggtgactccgcatcgttgccttttgatgatccgacttccgctcatccgaatatcgccgtgaacgatccggctggcgatctcgacatccctgacttcctgcgctgaaaggattgatccatggctgggttcatgaaaaacgcgatgtcctatctgggcatgagtgacgttgtggacgatgaggacgactacatcgaggaggacgaggagcagaagccggcttcgaagtccgcatttgattccgaccatacggtcacgccgctggcgtcaaccaccgcgcctgccgcatcgtcgactaccaagccgttccccggtggtcgtgtgaacagaatcaccaccatccatccgaagtcatatgaggatgctcaactggtcggccgtgcattgcgtgacggtgttccggtcgtactgaatctcaccggtgtggccgaagccgtggcatatcgcatcgtggacttctccgccggcgtggtgttcggcgtgcgtggttccctcgagcgtgtcactccgcgcgtgttcctgttgagcccggcgcaggtgaacatcaaggtcgaagagccgacaaaaccagcctcggcacacgatttgttcgctgactgaccggttcagtagttttcgcattcgacgttatatcggtattcggccgactcccagcaaggagtcggccgattcttattgtgctccgagcaaacttttcatgcgcggttgttagtctgtcagcatgctttccttagtgttctctctgatcggccgcattcttgcatggctcattaacgcgtatatcacggttctgttcgtgcgcatgattctggactgggtctccgttctcgcacgaaactggtatccacgtggtgtggtggcccagctgatcaatattgtgtattccattaccgaaccccctctgcgctggctacgtcgctatattcgcccattgccgctcggttcgatttatcttgatgtcagcttcattgtgctgtattttgcgctggtggtactggaaagtgttgttctgatagtgttctgaggccgtttttgacccgccggaggcatatatctggcataaaaacccacgtcgaatgttctgaaacgatggggtcgtgatagcattctgacttgagaccaacgtaagtgcgggcgatgccccaaagcgaggtgcaagatttatggctctgttgacgccgaaggatattagggagcacaccttccagactgttcgattcaaggaaggttatgatgtcgacgaggtcgatgacttccttgatcaggtcacggaaaccgtcgaggctcttggacgtcaggcggtagccggcggtcaggccacccagactctgggtcctgacgtgaccaaccttaatgcgaagatctccgatcttaccggtcaggtgcagcaactcgagtcggagaatgctggtttgaagaacgctgtggctcaggcccagcaggccgctcaggctggcaatgatcaggcagcacagcttgtctctgccaagctcagcgaagccgaggaatccaaccgcgcgctgtcctcccagaatgagcagctcaagggtcaggtcgatcagctgaacgctcaaatcgatcagctcaccgctcaggctgctcaggcctccggtgaccaggaggctgtcggtcagcagatcgccgccattcagcaggaacgtgatcagttccgcgcggccaacgaggagctgtcccgtcagctcgccgctgctcagcagcagggttccgccgctcagcagcagtccgctcagatcgctgagctgtcccgtcagctcgaagaagccaagcagcgtgaaaaccagcttcgtgctcaggtctctaaggtcgagccgagcaccgagaccggttctctgcagaagatcgctggcgccgcttccatgccgggcaccgagcccgagcgcgccaccgccatgctgaccctggctatgcagctgcacgatcagtacgtggagaagggcaagaacaaggccaaggaaatcatcgaggccagccagaacaagtacaacgatctggtcaccaaggccaacaactactccgagcgtacccgttccgaggccgacgactactccactcgtactcgttccgacgccgacacctattcggatcgtacccgctccgaggccgacgcttaccgtgaccagactcacgcggatgccgagacctactcccagaacacccgttctgaggccgacgcatactccgtcaagactcgtcaggatgcggacaactactccaagtctcagcacgatgacgctgacaactacgagaaggaagtgcagcagcgtgccgccgagtatgacaagaacactcgttccgcggctgatgcgtacgacaagaacacccgctctgcagccgatacgtatgccgagcaggtgcgcgacaaccttcaggctcagtccaaggtcgtcgagggcaacatccagagcctcaagcagttcgagactgaataccgcgcccgcctcaccgagtacctcggccagctggcatcgcaggtttccgagtcgaacaactacgtcgaccagacctcgtccaagaccaactgagcgtaggcaggtacaggtcgtatgacgaaccaacagggacggctgcgcacccgcgtggccgtctttgcatgtgtggccgcggctgcgctgattgtcgatcagctcaccaaggcttgggcgatggccgcgttatccaacggtcagaccattcgcgtgattcccggactgctgtccttcaccttggtgcgtaatccgggcgcgtccttgggcatgggatcaggcgctacttgggtaatcagtctgttggccgttgtggcttgcgtggcccttgctgtggctggggtgcgcactgtctccatgaaatggtcggtggcgatttctttcgcgtttgcaggcgctctgggcaacctgattgaccgtgttatgtacgctgacggcttcctcgacggcaaagtggtggatttccttaactatggctggtccgttggcaatgtggcggatatctatctggtagtcgccggtgtggtcctggtgattctgattcttatgggggagccgttctcacacaaggatctcatcgagcaatccgacgaatccctacagtctgagccggaggcggacgccaagtaatgagtcgaatagtccctgctcccgatgcattggtgggtaagcgtttcgacgtagccgtggccaaaatgctgggtatttcacgatctaaagccgccgatctggttgactccgggcaggcgcgcgttttaggacgtgaagttgcgcggtccagcacattgcaggcgggggagaccgtcgaatttgatttggcggaggaacaggccgagcctgagcctatcgcaactgatatggccgttgtctacgaagacgatgatgtcgttgtagtcgataagcctgtaggcgtggcggcgcatgcctcggttggctggaccggtccaaccgtgctcggatcactgcgtgaccgcggcgtgcatatcacttcctatggtgcggccgggcgtgagggcattgtttctcgccttgatgtaggcacttccggcttgatgttggtgtgcaagtccgaccttgcgtacaccgagatgcgtcggcagttcgccgagcatgaggtaaagaaaacctatcatgcgctcgtgcagggtggtcttaaagagaacaaagcaaccattgaggcaccgatcgggcgcgccaaagtgtccgatttccgcttctgcgtgactccggccggcaaaccggccgttacgcactgggatgtgctggagcgtttcggccatgaggccactctggtatccgtgaatctggagaccggacgtactcatcagattcgcgtgcatttctcctcgattgggcatcccctgtgcggtgaccccatgtatggtgccaatccggtgctgtctgaggccttgggacttgaccggcagtggctgcacgccatgaagctcgaattccgtcatccccgcacccgcgtctggaccacggtccggtcccagtacccggccgacttggctgccgccctcgatgccatgcgtgcccgacatatcgaacccgctgaacctgccgaatatgccgaagttctggtggactaattccgcaacgtgtgcatcatgcgttttaatatttagattcagttccggcttcgccggattcatcccagaataacgagagatcggtcatgatggctctccgtcatgaccataccccaagtgactgcggatgctgagtaccattcagtccaatggtcggtaaccgtacgtgaattaccggtatttccgctcaacgtgtctcggtactccagcgtgaagtgaacagaaatgagccaaagcagtaatgaagccgggcggtatatgccatccggattgcagaatctcctgctgataaaaaccgtttcctagtcgttgaccgtgcccgttccgacgacgatcgcggcctacgacgcgttcatcctctacccggcccaccgatacgacatcaagggcaagaggattctcaagcaggaaaagaagtactatgccgtggacttggggatgcgacgtatcctgtgctccaacaacgtgcgggacatcggacgcctcctcgagaacgtggtgttcctcgaactgatgcgccgcgagggcgacgtgtatgtcggacagagctccggcagcgagatcgacttcgtcacgaacgggccaggcggacgtcggtactaccaggtcagcgaatcggtgcacgattcggcgacgctggatcgggagccgtcctcgctgcgcgccgtgcgtgacaactatcccaagacgctgattacgctggatgacgaacggccctactcccacgaaggcatccgacagatatacgcgcttgactggctgttgaacgaagaccacaagaaacagtagatactagggcggccagcgggttagcaagacatcagttggtgaggactgctgacattgcactccgacggatgaattgaatactcatatggtatccgattctgaacaattgagtgggggcgttgatggttgccatcgtttgagctggctaaatgcgatttcgcgccatgctgtttcaacaacggtaacaacggctacagttgaactatgcatgggttgaagagtgcgattgacaggggagcggacgcgtgggcacgttcgctgcctgggcgcgtgttcgaccggtatgtgtcgcggagcggccccctgctggcgaatggtctggcatatggtctgctgttcgccttttttgccggcgtctggattgcggtgagcgtgttcggccttatcatggtcggcaacattgattggcagcagatgctgatcgacgcggtgcgtgaagtcattcccggtgtggccgactcgtttctgacgtcttccgcgctaggcgccatgtcaagcgcattgacgtggaccggtctggccacgttggccatattctggtggacagtgaccggctggatgaactcgctgcgccacgccgtacgggccatgttcgacgactgcggcgacgagctcaatatcgtcgtcgcaaggttacgcgatacgcttgccgccatcgccatcgcaatactgttcattctttcgaccgcggccggtacggtgtccggcggcatcgtacgccgactgctgcaatggggcggcatccccagcagttcgttgcccggcaccgtgcttttggagatgaccggtttcggtaccggcgtcgcgctgaatttcgcgttgttcatgttgctgctgcgcgtggtctcccacatcaaagccggacgattcacgatactcggcgcgttactgggatctctgacggtttccgcaatgcagcttctcggtgcgcgactattagccggagcctcccggaatccgatgcttgccccgttcgccgcgttgatcggcgtgctcatttggttcaacctcgtcgcccaggtcattttgctctgtgccgccctcattgccgagtgccgacaaaagagctgagcgtctgaactgactaatatgacaattagcgatgaagcctctctcgccgagatgattcgcgaactcagctggcactacagttattgccgtggtctttccatcttggcatatcgcaaacgagtagcttcacccgtgataccgagcttgcgaccaattgtttcccatgattggccacgctcatgcatgagcagtaccatctgcgcaatgcgggcatcaatgtattccagttcggctttgcgtcgattgattagacggctgagctccagttcgggagagaagtttgggctgtcctcgggaatgccttctgctggtgattcctgagactccacggcgtctgccgcagcgttgccgatttccatgagtttggcctgcacttcggggggagtagtcttcaaatttcatcgttatcactgccttagtgtcgctgttgctgatactccactttataggcatgtggcctcaccggtaaatatttaccgccgcccagaccacacggtatggtagagcgcatggctgattacgggaacaactttgtgcaactgcataaccacacgcactattcgctgctcgatggtgcgtcgaagattccggatttggccaaacgcgccgccgaacttggcatgcctgcggtcggcatcaccgaccatggcaacatgcatggcgcctacgagatgtacaccaactgcgtggccaatggcgtcaagcccatcatcggcatcgaagcttatgtgaccccggaaaccgcacgtcaagacaagtcccgcgtgcattggggtaccgaagcccagcgccgcgacgacgtttccggtggtggtctcatcacccacctgaccatgtgggcggaaaacgacgaaggcctggtcaacctcatcaaagcctcgtccgtggccaaccttgaaggccgtgttatgcgctacccgcgtatggataaggaggtgctcgccacctattccaaaggcgtgatcgcatcctccggctgcccctcgggcatcatccagacccgtctgcgcctcggtcaattcgatgaggccctgcgcgccgccggcgaattccaggacatcttcggcaaagacaacttcttcatcgaacttatggatcacggtctgcccatcgaaactcaggtgaccggtgacctgctgaccatcgccaagaaactcaacgcaccactgctggccaccaacgattcccactacgtacacgccgaagatgccggcgcacaggacgccatgctctgcatcaactccggttcccgtcttgacgatccggaccgattcaagttcgacggcaccggctactacatcaaaaccgccgaagagatgcgcgaactgttcaaggaccacccggacgcctgcgacaatacgctcgttatcgccgaacgctgcaacgtgatgttcgacgaccacgaagacggcgcgttcatgccgaaattcccttgccccgaaggctgggatgagacctccctgttcctcaaaaaagtcgaggaaggtctggagaagcgttacgacggcaacccgccgctcgacgtattgaagcaggccgactacgaatgtggtgtgatctgccagatgcagttctgcggatacttcctcgtggtcgccgactacattcagtgggccaaggaccacggcattatggtggggccgggccgtggttcggccgcaggcgccatggtcgcctattccatgggcattaccgagctcgatccgctcaagcatggcctgattttcgagaggttcctgaaccctgagcgagtgagccttcctgatatcgatgtcgacttcgaccctgaaggtcgtgcgcgagtcatcgaatactgcggcgaaaaatacggcaccgataaggtcgcccagtgcgtgatctatggcaccatcaaaaccaagcaggccctgaaagactccgcccgcatcatgggttatgaattctcagtcggtgaaaaaatcaccaaggcgctgcctccggcggccaccggcggcaaagacatcagcctgcatgacatcttcgaccctgccgccaaacgttatgccgaggccagggaattccgagaactctacgattccgacccggacaccaagcgcatcaccgaagaagccaagggtatcgaaggcctgatccgacagaccggtgtacatgcctgcgccaccatcatgggtagcgcacccatcaccgacacctcgccgttgctggaacgcaccgatggcaccatcaccaccaccttcgaataccacacgtgcgaaacgttggggctggtcaagatggacttccttggcctgtccaacttgacgatcatccacgacaccctgaagaacatcgaggccaacggcaaacccgccatcgactacaccaagattccgctcgatgacgccgaaacctacaaactcatgtcccgaggagacacgctcggcgtgttccagctcgattccgacggcatgcgttcactgctgaaaaccctgaagcccgataacttcaacgatatttccgcacttatcgccctgtaccgaccgggcccgatgagtatggattcgcacaccaactatgccaagcgcaaaaacggcctgcagaagatcacgccaattcaccctgagcttgaggagcctctgaagcaggtgcttgacgagacctatggtctgatcatctaccaggagcaggtgcagtccgccgcccgaatcctcgccggttattcactgggcaaggcagacgtgctgcgtcgagccatgggtaagaagaagcccgaagtgctggccaaggagaaggtgccgttcttcgccggtatgaaggagcacggatattccgaagaggcatcccaggccgtgtgggatattctggtgccgttctccggctacgctttcaacaaagcgcactccgccgcatacggtctgatctcctactggaccgcatatctgaagacgcactacccggtcgagttcatggccgccctgttgcaaggtgccgccaccaacaaagacaagaccgcactgtacttgggcgaggcccgccgcatgggcatccaggtgctctcgccggacgtcaacgaatcggtgtacgagtactcggcagtcggcgacgtcgtccgattcggtcttggtgccatccgtaacgtgggtgacaaggccgtggccgatatcatcgccgaacgcgaaggcccgcgcggcaagttcgtgaacttcatggacttcatccgccgcgtgcccctgaccgcgctgaaccggcgattggtcgaatcgttgatcaaggccggtgccttcgactcgattgacccgaaccgtcgcgcgctgctcaccgtgcacgaggccgccatcgattcggtggtgagtctgaagcgcaaacaggcggagggccagttcgatttgttctccgatgccgaggatgggggagcggaggccatgggcgacgcttccgtgaccgtacccgatcttgaggaatgggacaagaagaccaaacttaacttcgaacgcgaaatgttgggcctgtatgtgtctgaccatccgctctccggtatgcagtcgattctcgcgtccttgcgtgaaatgtccatcgcgcatctggttgatcgagccaaaacgatgggtgaaggacagcaggtcacgttggctggtttggtcaccaatgtggaccggcgcgtatccaagaagggcaacccctgggccatcgtgaccatcgaagacatggaaagctccatccaatgcatgttcttcggcaaggtctatgaagcggccgccgccgaacttgccgtggacgccatcgtacagattcgcggccaagtggagttgcgcgacgaaaccgtttctctgagagccacggaaatgcagattccgaccttggaagccgaggatgaacgtccgttggtcatcacgctgccgccggtggcgttggagcgccaacgcatgatgcaactcggtcaggtgctcgctaatcatcctggttactgcgaagtacatcttgcggtgctggatgagaagggtaacgctcaggtgctcacgtttggcgatcgtttccgcgtcaagcgagatacttcgttgtttgctgagatcaagattctgtttggccccagctgcttgcctgccgcctgattggcgggtttcgcccctggcctctccctcacctggctttgctgggggctccttcatcagagggagctaaggcgtgtgccaccatacgatgtgcgcgactactgtggaacgtatgggcatggagatggcggatactggtaacaacgatgacgagcaacaatggattgccacgatgctggaacggctgtctcattcgcagttccgcgccaaattcgctttgaccgacaaagaccgagcctatgcccgcaccaaaggcaaggcgaccatcgatcgtcatgcgcgagaaatgttgcgagaccgcataggcgcagccgaaccgaagaacgacggcaggcagacgccatggcgcggccatccggtattcaccgctcagcatgctaccgccacatgctgccgcggatgcatcgaaaaatggcatcatctgcccaaaggccgtgaactcgccgaagcggaggtaaaccgacttgccgatttggtcatggcatggattgagcgggaccttatcaatcatccggttcggtgaagcaccccgcatcctcagtatgcctgtatgccttcaatagttatgagccaacagccaacataggcctcgaaaaccgtagatgcaaggtattggcgaatgcggcagaacgccgaacgttgcctatggcgcgttcgtcaataatgcgacatgatgtctattcaagaagagttgatgaagtgtcaactctgccccaaggaggcggaatatgtactacagcagcggcaattatgaggctttcgcacgtccgaagaagccggccgacgtggacaacaagcatgcatacatcatcggtaccggactggcggcattgtctgcagcctgttatctggtgcgtgatggtcagatgcctggcgagaacatccacatccttgagaaggacccggtacccggcggcgcctgtgacggtcttgatattcccggccttggctatgtgatgcgtggcggccgcgaaatggacaatcatttcgaggtcatgtgggatctgttccgctcgattccctccatcgaaaccgaaggcgtcagcgtactcgacgagtactactggctcaacaaggaggacccgaactactcgctgtgccgcgccaccaagaatctcggcaaggacgcggggctcaagggcaagttcgggctgtccgacaaggcttcgatggaaatcatgaagctgttcttcaccccggacgaagacctgtatgacaagccgatcaccgatttcttcgatgatgaggtgctgaactccaacttctggctgtactggcgcaccatgttcgccttcgaaaactggcactccgcgctggaaatgaagctgtacatcaagcgctacattcatcacatcggaggcctgccggacttttccgcgctgcgtttcacccgctacaaccagtacgagtcgatgattctgccgatggtcaagtatctggaatcgcacggcgtcgaattccgctacaacaccaaggtcgagaacgtggaattcgcgattggcgggggagccggccccaagcgcgagcacaccggcgtaggccaagacaccatccagaagattcaggccacctccggcttcttcaagcgcaaccctgccagcacgcccaccaagaagcttgccgtgcgcatcgacgtggaccacgagggtgataaatcctccatcgacctgaccgagaacgatctggtgttcatcaccaacggcggttgcgtggagaactccaccatgggttcccagaactcgcccgccgcatggaacccagacctgaagcccggtggcggctgggatatgtggaagcgtatcgccgaccaggacccgagctttggccatccggagaagttctgctccgatccgaatgccaccaagtggatgagcgccaccgtcaccaccctggacggcgagattccgccgtacatccagaagatctgcaagcgcgacccgttctccggcaaggtcgtcaccggcggcatcgtcaccgtgcaggactccaactggctcatgagttggaccctgaaccgccagcagcagttccgcgaccagcccaaggaccagctgtgcgtatgggtctacggcctgttcccggacaagcccggcaactatgtgaagaagccgatgaccgaatgcaccggtgaagagatttgcgaggagtggctttaccacatgggcgtgccgaccgacaagatcgaggcgctcgcaaagcaccacgccaacaccgtgccggtcatgatgccgtacatcaccgcgttcttcatgccgcgcgcggccggcgaccgcccggacgtggtgcccgatggtgccgtgaacttcgcattccttggccagttcgccgagaccccgcgcgacacgattttcaccaccgaatactcgatgcgcaccggtatggaagctgtctacacgttgctcggcgtggaccgcggcgtgcctgaagtgtggggtagcgtctatgacgtgcgcaacctgctcaacgccaccgtcaaattgcgtgacggtgcaccggtcaccgatatgaagctcaacttcattgaaaaggccgtggtcaagaaggtgctcaagaaactcgacggcaccgatattgccaccctgttacgcgaataccgcgtaatctgacatccatctggctcccctcaaggtgaggggagccagcacgcgaagcgtgattgaggagagttgctcacaacggagtgttaagagaaggacaaaaacatgactgattctgatccccagttaatccgccacgccaccatcgacgatctggacgcgctggccgccatggaatccgaatgcttcccggccgccgaggccgccgaccgctcgtccctgtgcgcccgaatcgagacctatccggaatgtttctggctattgattgatggcgagatcgtcatggcgttcatcaacggtttcgcgaccgatcggcgcgacttgaccgatgacatgtacgaggatgccgcgcagcacaaccctcaaggtgactggcaaatgattttcggcgtggatactgcgccgaagtatcagcatcgcggttgcgccagtgcactcatgaggaaagccattgaagacactcgtgcagctggacgtaaaggcttggtgctcacctgcaaagatcggctggtcggattctatgcgcaatttgggtatgaggacgagggcatttcggagtccactcacggtgacgtggtctggcatcagatgcgcctgaccttctaatccccctttggctcccctctttgatgctgaggcgtctaaaaaaacagtccggtggactgtttttttagacgaaggcgagacgatagtcgagccataaggacgagagctttttgcgggtgaaccgtccgcgtgatcggactgaggggagttgaacgtggaataaattgttgcgacacgccggtgaacatctgatttcgttacgtgagcccataaaaagccggcgtatcctgatggtaacggcgtgattcaagctgatttcgacacgccgatggaacgacgtcgttgcaacgattctggcgtgttttttcgtgcccggtttgcgcgagtccgcgaatgcgtgtaagttatttccttgctgccgctcagcgagtggttctcctccggggagctgcgaggtgggtgagtggtggtggtttgagaactcaagagcgtgtttgtactacttctttatagtcaatgattgccagttcattcctcgcctgattgcctgtcgtggtggttgggtacccgggagggtttgatgaggggtgaggttttttgagggcgtccttccttaaggacgtgctcgtcaatttttgttttgagagtcatctattcggatgcttttcatgaagtttttttgtggagggttcgattctggctcaggatgaacgctggcggcgtgcttaacacatgcaagtcgaacgggatccatcaggctttgcttggtggtgagagtggcgaacgggtgagtaatgcgtgaccgacctgccccatacaccggaatagctcctggaaacgggtggtaatgccggatgctccagttgatcgcatggtcttctgggaaagctttcgcggtatgggatggggtcgcgtcctatcagcttgacggcggggtaacggcccaccgtggcttcgacgggtagccggcctgagagggcgaccggccacattgggactgagatacggcccagactcctacgggaggcagcagtggggaatattgcacaatgggcgcaagcctgatgcagcgacgccgcgtgagggatggaggccttcgggttgtaaacctcttttatcggggagcaagcgagagtgagtttacccgttgaataagcaccggctaactacgtgccagcagccgcggtaatacgtagggtgcaagcgttatccggaattattgggcgtaaagggctcgtaggcggttcgtcgcgtccggtgtgaaagtccatcgcttaacggtggatccgcgccgggtacgggcgggcttgagtgcggtaggggagactggaattcccggtgtaacggtggaatgtgtagatatcgggaagaacaccaatggcgaaggcaggtctctgggccgttactgacgctgaggagcgaaagcgtggggagcgaacaggattagataccctggtagtccacgccgtaaacggtggatgctggatgtggggcccgttccacgggttccgtgtcggagctaacgcgttaagcatcccgcctggggagtacggccgcaaggctaaaactcaaagaaattgacgggggcccgcacaagcggcggagcatgcggattaattcgatgcaacgcgaagaaccttacctgggcttgacatgttcccgacggtcgtagagatacggcttcccttcggggcgggttcacaggtggtgcatggtcgtcgtcagctcgtgtcgtgagatgttgggttaagtcccgcaacgagcgcaaccctcgccccgtgttgccagcggattatgccgggaactcacgggggaccgccggggttaactcggaggaaggtggggatgacgtcagatcatcatgccccttacgtccagggcttcacgcatgctacaatggccggtacaacgggatgcgacgcggcgacgcggagcggatccctgaaaaccggtctcagttcggatcgcagtctgcaactcgactgcgtgaaggcggagtcgctagtaatcgcgaatcagcaacgtcgcggtgaatgcgttcccgggccttgtacacaccgcccgtcaagtcatgaaagtgggcagcacccgaagccggtggcctaaccccttgtgggatggagccgtctaaggtgaggctcgtgattgggactaagtcgtaacaaggtagccgtaccggaaggtgcggctggatcacctcctttctacggagaattcagtcggatgttcgtccgacggtgtgcgccccgcgcgtcgcatggtgcgatggcggcggggttgctggtgtggaagacgtcgttggctttgccctgccggtcgtgcggtgggtgccggggtggtatggatgcgcttttgggctcccggatcgccaccccaggctttttgcctggcgcgattcgatgcccgtcgtgcctgggggccggccgtgtgccggcgcgatggcgtggcggtgcgtggtggcttgagaactggatagtggacgcgagcaaaacaagggtttttgaatctttgttttgctgttgatttcgaatcgaactctattgttcgtttcgatcgttttgtgatcatttttagtgtgatgatttgtcgtctgggaatttgctagaggaatcttgcggccatgcactttcgtggtgtgtgttgcttgcaagggcgtatggtggatgccttggcagacaggaccgatgaaggacgtttgaggctgcgatatgcctcggggagccgccaacagggctttgatccgaggatttccgaatgggggaacccaccgaccgtcatgggtcggtaccggcttcggccggggggtacgcagggaagtgaaacatctcagtacctgcaggaaaggatattccgtgagtagtggcgagcgaaagcggatgatggccaaaccttgcgcgtgtgatacccgtcgggggttgcgcgcggggtgttgcgggatcgcgtgcgccggctccgacgggccggccggcagttgcagaaaaccatgtgtcaggggaaccgggttgaataccgggccgcagagggtgagggccccgtacctgaacgcgcatggtctgccgatcgcgtctcccaagtagcacgggtcccgtggaaccccgtgcgaatccgcccagaccgttgggtaagcctgaatattcctgtctgaccgatagcgaacgagtaccgtgagggaaaggtgaaaagtaccccggggaggggagtgaaacagtctctgaaaccgtgcgcctacaatccgtcggagcccttttgtggggtgacggcgtgcctatcgaaaaatgagtctgcgagtcagtggcatgtggcgagcataacccgtgtggggtatgcgtagcgaaggcgagtcttaaaaggcgtttgagtcgcgtgtcctggacccgaagcgggatgatctagccctgagcaggttgaagcgcgggtaagaccgcgtggaggaccgaacccacctgggttgaaaaccggggggatgacttggggctaggggtgaaaggccaatcaaattccgtgatagctggttctctccgaaatgcatttgggtgcagcgtcgggtcattacgtcccgggggtagagctactggatgcttgcgggcccgtatcgggtaccaacagcaaccaaactccgaataccggtgacgcgtatcccggcagtgagtcggcgggggataagcttcgtcgtcgaaagggaaacagcccagaccgtcgtctaaggtcccgaagcgtgtgctaagtgggaaaggatgtggagtcgcatagacagccaggaggttggctcagaagcagccacccttgaaagagtgcgtaacagctcactggtctagtggttccgcgccgacaatgtagcggggctcaagcacaccaccgaagacgcggcagtattttgtactgggtaggagagcgtcccatgaggggcgaagcggccgtgtgaacgcgccgtggacttcatgggagtgagaatgcagacatgagtagcgagagacgggtgaagatcccgtccgctggatgaccaagggttccagggccacgttcatcgtccctgggtgagtcgggtcctaaggcgaggccgacaggcgtagtcgaatggatgaacgggtcgatattcccgtaccggctttcagccgccaaaaccgaggcttggagtactaacctccgggtccgggcttactgctccttcgggggcgggatgccctggcctgttgggaccgatccttgtagtaggtcagcgcaggagtgacgcagaagggtagccggccgcggaggtggtcttccgtggtcaagcacgcagggcgtgggacaggcaaatccgtcccgcatgggtccgaggtgcgatgatgggggccttatggcccgatatccggtgatcccggctgccgagaaaagcttcggcgtcaggctcgaagccgcccgtaccccaaaccgacactggtggtcaggtagagaataccaaagcgatcgagcgaatcctggtcaaggaactcggcaaatcactcccgttccttcggtttaagggagacccccgatggtgaacacacttgctgtgggagcttttgggggtggcacagaccagggggtagcgactgtttaccaaaaacacaggtgcatgcgaaggcgcaagccgctgtatatgcactgacgcctgcccggtgccggaaggttaagaggatccgtcagccttcgggtgaagcggtgaattcaagccccggtaaacggcggtggtaactataaccatcctaaggtagcgaaattccttgtcgggtaagttccgacctgcacgaatggcgtaacgacttccccactgtctcgaccaggagctcggcgaaattgcagtacgagtaaagatgctcgttaagcgcagaaggacgaaaagaccccgggacctttactataccttggtattggcattcggtgtggattgtgtagcataggcgggaggccgagaggcgcggtcgccagaccgcgcggagccgtaaggtgaaataccgctctgttcgcattggatgtctaacctcgaacagtcatcctgttcagggacagtgcctggcgggtagtttaactggggcggttgcctcccaaagagtaacggaggcgcccaaaggtccgctcagcccggttggcaatcgggtggcgagtgcaagtgcacaagcgggcttgactgcgaggacgacggtccgagcagggacgaaagtcgggactagtgatccggtgccggtgtacggacgcggcatcgctcaacggataaaaggtaccccggggataacaggctgatcattcccaagagtccatatcgacgggatggtttggcacctcgatgtcggctcgtcgcatcctggggctggagcaggtcccaagggttcggctgttcgccgattaaagcggcacgcgagctgggttcagaacgtcgtgagacagtttggtctctatcctctgcgctcgttggaatgctgaggaggcctgcccatagtacgagaggacctgggtggacgaacctctggtatgccggttgtcacgccagtggcacggccggttggctacgttcggaagggataaccgctgaaagcatctaagcgggaagcctgctccaagataagcattccgtggaaccttcgagttcctgtagtccccatgcagaacacgtggtcgataggccggacgtggaagccccgcgaggggtggagccgaccggtactaacggacgaaaggcaacactaacattccaacccctggcggttggaccgcatcttcctcctgcaaacggcaccagacggcaatgagcattgtctggccacaagacgaaacatcgacatatccgcgtccgctgtccggttcccaggccgccacaggccggcagaccccaagcgtctgaccgtacaagagaagatttgcggcggccatggcccaggtgagacgcccggtcccattccgaacccggaagctaaggcctggcacggcgatggtactgcacccgacagggtgtgggagagtagcacgccgccgcatcacacgtacaggaagccccttggagcacacgccccaaggggctttcgcatacccgaaacactcacgacccaaacccacacacccccacaaaaacacccggggcttctcgcatgcccggacacaaacaggacacctccggcacccacacggcaacggggcctccccatacccgtgggaccacgactgatctgtgctgcgatgtgtggatcggaccggcggttctgaatgtgctgatgccattcggtcgttggtcgtgccaaggcaagcggtacggcaaccgcatcgctaccaggcggttgattggtgcgcgactggcgagcagatagtgatccggacataatggttcttatcggtgtactggatcaatgatgattccgataattggcggtgcgccgcatgcgccgtaagaggtgattcgcgacacgcccgtcggccaaatttttcaatccgtttttcgacgatgtctggttctggactgaagatatgggcgtgcgaaacgtcgatttcgacacgccgagcgaagcctgtcgtttcaacgatttgggcttatcttcgtgcgcccgatttgcgcgagtccgtgaatgcgtgtaagttattcccttgctgccgctcagcgagtggttctcctccggggagctgcgaggtgggtgagtggtggtggtttgagaactcaagagcgtgtttgtactacttctttatagtcaatgattgccagttcattcctcgcctgattgcctgtcgtggtggttgggtacccgggagggtttgatgaggggtgaggttttttgagggcgtccttccttaaggacgtgctcgtcaatttttgttttgagagtcatctattcggatgcttttcatgaagtttttttgtggagggttcgattctggctcaggatgaacgctggcggcgtgcttaacacatgcaagtcgaacgggatccatcaggctttgcttggtggtgagagtggcgaacgggtgagtaatgcgtgaccgacctgccccatacaccggaatagctcctggaaacgggtggtaatgccggatgctccagttgatcgcatggtcttctgggaaagctttcgcggtatgggatggggtcgcgtcctatcagcttgacggcggggtaacggcccaccgtggcttcgacgggtagccggcctgagagggcgaccggccacattgggactgagatacggcccagactcctacgggaggcagcagtggggaatattgcacaatgggcgcaagcctgatgcagcgacgccgcgtgagggatggaggccttcgggttgtaaacctcttttatcggggagcaagcgagagtgagtttacccgttgaataagcaccggctaactacgtgccgcagccgcggtaatacgtagggtgcaagcgttatccggaattattgggcgtaaagggctcgtaggcggttcgtcgcgtgccggtgtgaaagtccatcgcttaacggtggatccgcgccgggtacgggcgggcttgagtgcggtaggggagactggaattcccggtgtaacggtggaatgtgtagatatcgggaagaacaccaatggcgaaggcaggtctctgggccgttactgacgctgaggagcgaaagcgtggggagcgaacaggattagataccctggtagtccacgccgtaaacggtggatgctggatgtggggcccgttccacgggttccgtgtcggagctaacgcgttaagcatcccgcctggggagtacggccgcaaggctaaaactcaaagaaattgacgggggcccgcacaagcggcggagcatgcggattaattcgatgcaacgcgaagaaccttacctgggcttgacatgttcccgacggtcgtagagatacggcttcccttcggggcgggttcacaggtggtgcatggtcgtcgtcagctcgtgtcgtgagatgttgggttaagtcccgcaacgagcgcaaccctcgccccgtgttgccagcggattatgccgggaactcacgggggaccgccggggttaactcggaggaaggtggggatgacgtcagatcatcatgccccttacgtccagggcttcacgcatgctacaatggccggtacaacgggatgcgacgcggcgacgcggagcggatccctgaaaaccggtctcagttcggatcgcagtctgcaactcgactgcgtgaaggcggagtcgctagtaatcgcgaatcagcaacgtcgcggtgaatgcgttcccgggccttgtacacaccgcccgtcaagtcatgaaagtgggcagcacccgaagccggtggcctaaccccttgtgggatggagccgtctaaggtgaggctcgtgattgggactaagtcgtaacaaggtagccgtaccggaaggtgcggctggatcacctcctttctacggagaattcagtcggatgttcgtccgacggtgtgcgccccgcgcgtcgcatggtgcgatggcggcggggttgctggtgtggaagacgtcgttggctttgccctgccggtcgtgcggtgggtgcgggggtggtatggatgcgcttttgggctcccggatcgccaccccaggcttttgcctggcgcgattcgatgcccgtcgtgcctgggggccggccgtgtgccggcgcgatggcgtggcggtgcgtggtggcttgagaactggatagtggacgcgagcaaaacaagggtttttgaatctttgttttgctgttgatttcgaatcgaactctattgttcgtttcgatcgttttgtgatcatttttagtgtgatgatttgtcgtctgggaatttgctagaggaatcttgcggccatgcactttcgtggtgtgtgttgcttgcaagggcgtatggtggatgccttggcagacaggaccgatgaaggacgtttgaggctgcgatatgcctcggggagccgccaacagggctttgatccgaggatttccgaatgggggaacccaccgaccgtcatgggtcggtaccggcttcggccggggggtacgcagggaagtgaaacatctcagtacctgcaggaaaggatattccgtgagtagtggcgagcgaaagcggatgatggccaaaccttgcgcgtgtgatacccgtcgggggttgcgcgcggggtgttgcgggatcgcgtgcgccggctccgacgggccggccggcagttgcagaaaaccatgtgtcaggggaaccgggttgaataccgggccgcagagggtgagggccccgtacctgaacgcgcatggtctgccgatcgcgtctcccaagtagcacgggtcccgtggaaccccgtgcgaatccgcccagaccgttgggtaagcctgaatattcctgtctgaccgatagcgaacgagtaccgtgagggaaaggtgaaaagtaccccgggaggggagtgaaacagtctctgaaaccgtgcgcctacaatccgtcggagcccttttgtggggtgacggcgtgcctatcgaaaaatgagtctgcgagtcagtggcatgtggcgagcataacccgtgtggggtatgcgtagcgaaggcgagtcttaaaaggcgtttgagtcgcgtgtcctggacccgaagcgggatgatctagccctgagcaggttgaagcgcgggtaagaccgcgtggaggaccgaacccacctgggttgaaaaccggggggatgacttggggctaggggtgaaaggccaatcaaattccgtgatagctggttctctccgaaatgcatttgggtgcagcgtcgggtcattacgtcccgggggtagagctactggatgcttgcgggcccgtatcgggtaccaacagcaaccaaactccgaataccggtgacgcgtatcccggcagtgagtcggcgggggataagcttcgtcgtcgaaagggaaacagcccagaccgtcgtctaaggtcccgaagcgtgtgctaagtgggaaaggatgtggagtcgcatagacagccaggaggttggctcagaagcagccacccttgaaagagtgcgtaacagctcactggtctagtggttccgcgccgacaatgtagcggggctcaagcacaccaccgaagacgcggcagtattttgtactgggtaggagagcgtcccatgaggggcgaagcggccgtgtgaacgcgccgtggacttcatgggagtgagaatgcagacatgagtagcgagagacgggtgaagatcccgtccgctggatgaccaagggttccagggccacgttcatcgtccctgggtgagtcgggtcctaaggcgaggccgacaggcgtagtcgaatggatgaacgggtcgatattcccgtaccggctttcagccgccaaaaccgaggcttggagtactaacctccgggtccgggcttactgctccttcgggggcgggatgccctggcctgttgggaccgatccttgtagtaggtcagcgcaggagtgacgcagaagggtagccggccgcggaggtggtcttccgtggtcaagcacgcagggcgtgggacaggcaaatccgtcccgcatgggtccgaggtgcgatgatgggggccttatggcccgatatccggtgatcccggctgccgagaaaagcttcggcgtcaggctcgaagccgcccgtaccccaaaccgacactggtggtcaggtagagaataccaaagcgatcgagcgaatcctggtcaaggaactcggcaaatcactcccgttccttcggtttaagggagacccccgatggtgaacacacttgctgtgggagcttttgggggtggcacagaccagggggtagcgactgtttaccaaaaacacaggtgcatgcgaaggcgcaagccgctgtatatgcactgacgcctgcccggtgccggaaggttaagaggatccgtcagccttcgggtgaagcggtgaattcaagccccggtaaacggcggtggtaactataaccatcctaaggtagcgaaattccttgtcgggtaagttccgacctgcacgaatggcgtaacgacttccccactgtctcgaccaggagctcggcgaaattgcagtacgagtaaagatgctcgttaagcgcagaaggacgaaaagaccccgggacctttactataccttggtattggcattcggtgtggattgtgtagcataggcgggaggccgagaggcgcggtcgccagaccgcgcggagccgtaaggtgaaataccgctctgttcgcattggatgtctaacctcgaacagtcatcctgttcagggacagtgcctggcgggtagtttaactggggcggttgcctcccaaagagtaacggaggcgcccaaaggtccgctcagcccggttggcaatcgggtggcgagtgcaagtgcacaagcgggcttgactgcgaggacgacggtccgagcagggacgaaagtcgggactagtgatccggtgccggtgtacggacgcggcatcgctcaacggataaaaggtaccccggggataacaggctgatcattcccaagagtccatatcgacgggatggtttggcacctcgatgtcggctcgtcgcatcctggggctggagcaggtcccaagggttcggctgttcgccgattaaagcggcacgcgagctgggttcagaacgtcgtgagacagtttggtctctatcctctgcgctcgttggaatgctgaggaggcctgcccatagtacgagaggacctgggtggacgaacctctggtatgccggttgtcacgccagtggcacggccggttggctacgttcggaagggataaccgctgaaagcatctaagcgggaagcctgctccaagataagcattccgtggaaccttcgagttcctgtagtccccatgcagaacacgtggtcgataggccggacgtggaagccccgcgaggggtggagccgaccggtactaacggacgaaaggcaacactaacattccaacccctggcggttggaccgcatcttcctcctgcaaacggcaccagacggcaatgagcattgtctggccacaagacgaaacatcgacatatccgcgtccgctgtccggttcccaggccgccacaggccggcagaccccagcgtctgaccgtataagagaagatttgcggcggccatggcccaggtgagacgcccggtcccattccgaacccggaagctaaggcctggcacggcgatggtactgcacccgacagggtgtgggagagtagcacgccgccgcatcacacgtacaggaagccccttggagcacacgccccaaggggctttccccatatccgaaaccggccccggcccgaacccgcacgggcaccgggacctccccgcatacccatgagacccacgcccgggaccattcccggcctgtgttttagcaagttggcgtccgctttgtgagcggtgtttttccgcagtgtaggcagcgggttttccgcagggtgtgcggtatcggccgctgcctgtctgcgttgtgttggttatttggtcatgagggcgtgttcgcttcggtaggagcggccctcgaatctgatgagccgtccgtggtggacggtgcggtcgatgagggcggcggccatgttcttgtcgccgagcacgcgtccccatccgctgaattcgatgttggtggtgtagatgatgctccttgtctcgtaggaatcggaaatgatctggaagaggagcctgctgccctcctcgtctatgggcaggtagccgaactcgtcgatgatgagaagtcgggccttgccgatgctcgcgagttcccggtcgagccggttctcctgctgggcgcggcgcagacgcatgagcagtccggtcgcggtgaagaagcgcaccgggacgccccgctcgcaggcgagccgtccgatcgcgatggccaggtggctcttgccggtgccgacgggcccgtagagcacgaggtcctcgcatccggcgacgaagtcgaggttctcgagctgcgcgcgcccccagtcggcgggcatcttcaggttggtccagtcatagccgtcgagggtcttgtcggcggggaagccggcctgtttgagcaggcgcaggcgtttggatcgctcgcgcgagtcgagttcggccgtgaaccatcgttcgatgaagtcgagctggttgggcgtggcctcggcgagcgtgccggcgagcacgctgcgtgtcagggtcaggctgcggctcatcttcaggatgcgttcgcttttctcggtcgtggacgcgcgcctgcgtcgggtctccgggatcaccggatcgggtctgacgctcaccgttcttcccctccgtcgtccgtgccggtgatgaaccggtcgtagccgctcaggtcgggctcctcgatcccgccggggtattcccactcgccgtcgcgcatgcgcaacgcgataggggtgagcgagtccgcgtgcaggcccatgtccctgttcgagcgcaggatctcgccgcacgcctgcatcgcgggatcgaacccggccgcccggcacgcgtccccgatcgctttgaggctctccctcaacgtcttttcgtccatggaatcaagccacgcgcgtatatcgtcgggcacgtccgggcggatcgagctttcccgccacgcgcggggtttgaccgcgagccggggaagcacgagcgcgggatcctccacattgcgcgaccgtccgtactgtctgggatattccgcgaggagctcgccggtggcgggcgatgcgagcgtgaccgtgtcccaccggatcgcggccagcaccttggaacgcgccgaatcggggccggcgaggtaccggttcgagtcgatgtcgaccagcccgtacttgtcggccgtccggctttcccagcgaaccgggtcgaacgccgtggacggcaacggcatcaacgcggccctctcctcgtcgaacacctcggccacgggcacgcccggcaacctcgggcaatacgaagaggccgccagcccgtcgcaccgttcaagcatgaaacgactgagctgcccgtaggattccgcgtgcatgggcggcaccatgagattgcgccgcaaaaacccgaccgcgttctccacgctgcccttctcgttgcccgagtacgggttgcagaaccggacctcgagccggtaatgcgccacgaacgcggagaacaccccggtcaacgtgacctcgcccttcgcgttgcgccggccggcaccggtcgcgttgtccatcacgatcacgggaggaacacccccgatatgctcgaacacgagcatcaggccatggcacagacactccgcgttctcgcccggcaacgccacgcacaaccgcatgttcgaatacggcaacgagaccaccaggcaatgcacgtccgccatctcgccagcgatccgggcccgggccacgccgaaatcgacctgcatgctgcccgccgcccactcgagccgcacgtacccctcgcgatccggcacgccgcggttcgcctcgcgccaccggtgcacgtaacgcatcgtggtcgaatactcgccgtcgtagtccgtctccgccagcagacggtcgtgcacgcgcctgatcgtgtgccgctgcttcctgggcagcagacgatcggcctccagccacccgtccaccagatgcgcgtacgggtcgatcttcgacccgtacctgcgatccgccttcggcttgggcgagcaatcctccatatccgcgtacttcgcgaccgtcccgcgatccacatgcagacgacgcgctatctgcgcgcgcgacattccctgccggtcgagtctcctgatatcttgcacaatgggcatcggtatcgccatgttcctttccttcccgagcgccggccggcggcaaccggccgaatcaaaaccgattggcaactcgggaatatacaggcggcggcaccgatgcctctcacatcaccgggaaacgatgacggcaccggggaaaaccatcagcccacactgcggaaaaacactgccgaacctgtcgaacaaacattgaagcaaaacatcccggccagccccgacggcgaggccgaacgacgcggcgcgtccgcgaccgtgggagcccgacgcccgggccccccggtccgccgcgcagacagctcccctccagaggggagccagaaactggcttggttatggggtcgctctacactggcttctgctatgcattacttcacccctaaacgttgcgctacgtcgaataaaatcatgtatcacgataaggcgcaggttcagcgtgccgctgatcaaagcctaatcgagcgcggagttgagctatgggtgtaccgttgcgaattttgcggatgctggcatctcacgcatcgcgatccgcaatccagttaccggcatgtaccgctgaaccagcaactcaagccacacagtcgtaaaaagggctacaagccacgtagacgttagcgtcagaagctccacagacctcgccaacgccgtgtctgagacaggttacggtccaaacacgtcaggtcgtaggctgctaagcgttcagggcgctcggacacacttcgtccaacacttacatcaccttggtgttttcaaggttgcggataacccaatcgttgaagcgaattaccggcttgcgcaacataagtcccaacagcaatgaggggacaaggaacagtgccagtttgcccatggaaacccagtattccatgccgaatgagcctgccatggccgaatgcatcgcatccaccgcataggggaacagtagccatttagaaacgacctggaagaacgtcggcagtgtttcaatggggaatgtgccgccggaaccggctacctgcataaccagcagtactacggcaatggctttgccgatatcaccgaacgacagggtcagcgtatacacaatattcgagaacaccagtgcagacaaccacccgaccatcaagaactgaatcggatgctcacactgcacgccgagatagaacatatcgcccaggcacaccagcgtaccttgcagcaaagcaaggaaaccgaaaatcatgtatcggccgaaatattcgtggtgcaagcgtaaaccgaactgccgcgcattgccgggagcctcggcacgcggcttcttcagcacatccaacgcggcggccggtccggcaatccgcccggcaatcatggcctcgcgaagacccacttccgaaccgagcggcagatcattgcccaaccctaagatacgagccttctcatggtcggaaatcgatactttcaacatggcgaccagaatgatcgcaccgacccaaatagacaaaatcgtgtagaacggagccatcgcggaaccatagttggcaacgggatagagcgcgatgcggtcgaccgctacgggtgccgccagcatggaagcaatggcatcgggcttcgcagaggaaatcgcagacaggtcgatggtgccgccattggtgatagaggcgagttgggaagacaagttgtcgagtttcttcgccgaacgggtcaaagcgctagctgcgtcagtcaaggccgactggatgtccgtcaggctgtctgaaacgccgccagaaagacctgacacgctgcttacggtcgatgcaagcccgtcgattacggaacttgcctgcgtggtcacttcgtccatggacgaggtcagattgttcagttgcggtttcagcgtgctcttgtacgtgtctgaagcctgagtaatcgattgtttggcggcagcgatttgtgatttcagatctcgacgcgctgtatcggcatcggcagtaccgtttgctatgtgcgtggccgcatcgcccaacgcggtggcggcttgctgcatgctctgctgcgcctttgtggcttggtctgcagccgcgttcagttgagcggcaacggtatctccgcccacgggcagtgaagccgcttgtttggcgagatctcgtaaagcggcggcatactttccaaagctgtcggcctgagcctccactttggattgcatatcggttagcttgtttgatatctgtgaggattgtgagcccacatcggcaaaagcggcatcgatttgcttggcaatggtgtcgtaggatgaaccggcctgctgcaatgccgtaccgacgccatcggtggctccggacaatgccttgtcgaggctggagacgccgttgcgggtctgtttcaacgcctttttggttgtggccgcagctgagcctgttgatcccagcagcttatcggtggaatcaatgatgctgttggcggccccgagcagattggcataggaatccatctgcgacgcagtgccggtcaaacgagacgacatggtggcaatatgactggaggcgttgttgacgtactgctccatttgcgggctttgcgcgtaatcggccacgttggaaaccaaatccagcgccacgctcgccaaggtcttcacaaatgtctggtcgatggtcgtggccacggtggtagcaccctggtcggtgatatgcggagcgatcggattgattttctcattgagatagtattcgagcttggcgtgcttgatcttcggtgaaaacagcgtcatcatatcggagctgaagctctttggaataatcagcgcggcatagtattcgcctgagttcacgccatcgatggccttagcacgatccacaaactgccagtcaaggtcatgattggccctgagcgtattggtcacggtttcgccgacgttgatggtgatcggcatcagatcggacttatagcccttatccacgtttgccacagcgaccttcaaggccttggtgttgccgtacgggtcccagctggcggcgatgttgtaccaggcgtacagtgccggcacaatcaccaatcccatagccacgattacggcgatcacattgcgggtggcttggcgcacgtcacgtacgaatattttccagataagcttcatcgtgcgcctccttgcccagactgcccagactgcccagactgcccagactgaccggactgtgcggtgtgcgcagtcggctcggcggcctgatcgccgaacagtgtgagtcgttcagtggtttcgccgatatccggattgctgcccatcgccgcttcgtgacgtccgtggccgtggaaacgccgccacacatatccgttgagcatcacattgcggaactcgtcggcactcatggcactgacgccaagctgcatggcgtaggtttcgcgtgcgtattcaaccacaatgagataggcgtcgataagaataatcgacagaatccaggaggtcagcatggcgattttctcttgggtgacgaacagcagtaccaggaatacgaacgggagtacggtcagcaatgtcagaccggcaacgatcatctttggataccgtgcgaagaaccggtgcgcgcgatgggcgatgatatcgcgcagttccttgctgtcggacaccgtgcggaatacggagttcaagctcacctgttcgttcaccatgctgttgtgctcggtgatcatcaggtcggtatctcccaaacgacggtcgaacagcgcgttcaggttcatcgcataccggcgtatgacaagtcccacgaagagtgccgccggcagataccagaacaggtgcagcatgtcgagccagtaatggttcgcgtacaggccggcaatcgggccgcgcatcgcgttgatgccgtaggtaaagggcagccacgggtgcagttcgcggaagaagttcggcatcatttcaatcggatacaggccggaggcgccgggtatctgcacaatgaccagaattacggcgatggctttgccgatatggcggaacgccacggccagtgcgtaaataatgttgatgtatacgaacgaacagaagatcccggccaagatgaacagcagcggatgctcgcattggatgccaagcaccagatcgccgatggtggcgatgacggcttgcaggaatccgatggtgaccagcagcagccagcggccaagatatgcttgcgtagcggtgatacggcgaatgccctcgcggtcgacctcaagcttgtagatggcgattagcacgaaaccgcctacccacagtgccagattcgtgtagaacggggtgactgcggacccgtaattgtcggtggcatacacgactttcgtggtcagggtgacgggattgcccatgaagtcgccgaatcccttgtcatccagatgcagcgtatcccggattttctggtaagcggcggaactatcgagcgtggcgatatcggtgcgtacggtggcgacatcgctggccacctggcgcagcgaatcctgcgtgctgctgatggtggtttttgtttggttcagggtatcgacaagctggtcgaacagtccgtcggcctgatccaaggtgccggataacgaagtcaacgtgccgtccagtgtgccattcagggcggcgaaactgttcaatgatgaggtgagcgacggcattacggtgccggtcagcgagccgcgcgcggtattcagcgccgcgatgccgccggtggtggtgttggtcatggctccggaaagattcgtggtggcgtctttaccggagttgatgaactgtgtggtgtcggtatggaaggtgttgagctgtgtctgctgtttgctgatcaatgagtcgagcgcatcgatttgtttccagatgttctggccgactgggtcggtggtgtctttgccgatgccggctttggtcagcgcgtctttcagatcgctgattgacgtttgggtggcattcagtggggccgaaagtgtgttggtgatggtgtcgacggagttctgcgcgctgttgaaggagccggtgatgctgccggcggcgttgttgacgtgaacggccagtccggagagttgtgctgaactggtgtcgagcgcgccgaccagtgtggtggagaaggcttgtgacccggcctgtgtttccgtcaacagtgtgccggactggcgggaggccttctgcgcggccgcgacggtctgcttgagtgaggcggtggtctgtttgacgtcggcgagaatcgtgtctgattgggccagcgtgtcctgtaagtcggtgagtgaatcctgaacggtgttcagcgtggacatcaccgtattgagatcattgatcgtatcgtgctggactttgccggtggcttggtcgagatcgcctcccgcttcggaaacggccgaggcaacggtggtggctaccgtggtgacgaaggcggagttgatctgctcgtcgatggtggtggcaccggtgtcggtgattttcggcgcgatcgcgttcttcttctcgttgacgtaatacttgatttttggctgtttggaggttccggtcaccgattcgaccaggctggtgctgaaatccttgggcagcacgatggctgcatagtatccgccggtctccacgccgtggacggcctgttcctcattgtctacgaagcgccagccgagttcgtcgttctgcttgagtttcttgacgacctgccggcccgcatcgagatggccgaccagatcgttggtggtgccttggtcttcattggctacggccacttgcagattgccggtggttgaatagggatcccagttggcgagaatgttgaaccatgcgtacagcgagggcagcattgctacgccgagcgtcaccacaacggcaacgggattgcgtaagatacgtctgcaatcgcgtagaaagacttgccaaaccgtccgcatccagtccctcttttccggttcgtaatcattgcggccacatgcagtctattcccaccactggtgcgaatactgctggtttggcgggttttcttgcaaaactggccgttggttgtccgcataatgggactgatatgtgaacgtttgttgatggtgcgacaccggcgggatggttgtgcaattttgccggtatccggtgatgaaatgttgaggtgttggaactgagtcgtcgcagtgctgagaccgagacgactcagtgacgagcctatccgaggctatctcgttggttctggtctcactgatccagacggaagccctgagcggcggccttgtcgagcagtgtctgatggctgacatcctgccgactgatcgtggcgacctgatcgctgaaagcgtccaccggacggtcggcttggcgcagatcgtagtaccggtgaacttcctcgtcgaaggcgggcagctggtcgagtacgccatcggcgtcagccgggtaggtgttctcgaagaactacatcgtgcgcggcatgcgcggcttgacggtcgggttctgatcgggcttgccgatggccagacccagcaccggatacgtgtattccggcagattcagcacgtcgataaggccggggatgttgttgagcagagagccgagaatcacgcagcccagtcccagcgaataggcggcggtctccatggcgtgcagggccagcactgcgtcgttctgagcttgggtgaagcgatagctgtacttcagatggaattcgtcggaagcgggatcgatgcccttgcgttcggcgatgcgcgcgttgcggtgctcgtcgataacgaacacgtacagcaacggcgcagtggcgatatacggctgatggccgaattcggcgagcttggctttgatggccgggtcgatgatacggatggcggaccagtcgttaaggaactggctggacgcggcatgctgggcgacggtttcgagcgtggcgcgggtatcgtcgtcgatggcctcgtccttgaacttacggatggagcggcggcccagaagagcctcgattgttgcgttggtaaccatggttttattgtcgcacggcagacgccggacgccacggtggattacctcacagtgaaatgccgatattgtgtggcggaactgtgctggactgatggttcctgtcgattgactgatggttccttgacgaaaatccagcgatgagccatcagtcaaccaacagaaaccatcatccaaccgggggattagcggctggacttgcgatggcggtggtcgacgaacgccttggagccccgatccgacagctgcgaaaccactgcgccgagtgcggccgaaacggcggcgaatgccagactcattgccagaccttgcggcgcgtctgccgccagtcccttgcgcagattgcgtttgctcgtgcccttgtcccatatcatctggaatgctttgccggcaaccaagcctgccagcgctgggactgccgacttgatgagcttgtcgcccagagaatcagggtcgttgagccggtcctcgcgcagcctgttgaccttctcgtcgatgcggtgcaggctgtcgaccgcacggtcggcgctggaggggaagtcggtgttcgtttcgtcgctcatgactctcagtctaatagcatctcaatcatctcagcgcaaaagatgggcgttaatggtggagtcatgaacgagcgcagactagagtggaggcatgagcgaacagaacgtgaacggcaccgttgccgtcgagaactctcgtggcggcaacggatttttggtgttgctgcgccacggccagaccgtgtggagcgaatccgggcagcataccgggcgcacgaacatcccgttgaccgcggtcggcgagcagcaggcagcggatgccggaaggcgcctgcgcgaagctttccccgaaggattcagccagggctgtgtgttttccagtccgctgaagcgggcgtgccaaaccgctgaactggccggttttgcggaccacggtgtgttggacggcatcgctgaatgggattacggccgagccgaggggcgtacgcgccagcaggtgagtgaggccagcggttttgaatgggatgtgtggcgtgacgggccgcgctcgctgacgcccacgctggagggcgattgggtcgagaccttaccttcgggcgagcaggtgccggtccatgccgggcctggcgagacgctggaagaagcagcggtacgcgccaagagcgccatcgatgagattacgccgctgctgaaagacggccataatgtgctgttggtggctcatgcgcacatcctgcgcatcctcacctcgcaatggctgggcgtggacccgcatttcgcgcggttgctgcgtttggatacggcgcactactcggtgcttagcgtctataagggagataacgtcatcgaacggtggaacgcctagccccggttgcgctgtgattacgctggcctgcccgctgctgcgggcgggcctttattgtttgtggtgggaattgcggtatgtcgataaatgatttgcaaacgatagcgtcgccgtgttgtttttttttgatgggtataagtggcaatcgattgccatgaaagatatgttagcgctctcataattgcgaacgcttgcattgcgataatgaggcaaaaatgaccgaattaatgggatatttgttgacaatggcctgaaaatgatgatttatgacgcgccgatattgctatcgtttgcaaaaagaagcaaaccgttgcacaatagtgcatgtcgatagtcataaaggtgcgtgttagcgtacctgtcctgaccggggacggccggggtcgacgatgaaagagaaaggttcgatgatgaatcgtacagtcaagtcagcagtcgcgatggcggctatcgctgcgatgtccctcggcactttggcggcctgcggaagctcgacctccggcgatgacgccaagggcaaggtctactacctgaacttcaagccggaagcggctgatcagtgggccgctctggccaaggagtacaccaaggagaagggcgttgatgtcaaggtccagaccgcggcctccggcacctacgagcagaccctgaagtccgaaatcgccaaaaccgaagccccgaccttgttccaggtgaacggcccggtcggctaccagaactggaagaagtacaccgccgacatgtccaacacggatgtgtataaggaactcaccaaccaggacgtggccctgaaagacggcgacaaggtggtcggtgtgccgtacgtgatggaaacctacggcctgatctacaacaaggacatcctcaacaagtacttcgcgctggatggtgccaaagccacgtccatggacgaaatcgacaacttcgacaccctgaaggccgtggccgacgacatgcaggcccgcaaggacgagctcggcatcaagggcgcgttcacctccgccggcttcgactccagctccgactggcgattcaagacccatctggccaacctgccgctctactatgagttcaaggacgacaacgtcaccgagcagccggccaccatcaagggcacttatctgccgaactacaagaagatcttcgacctgtacatcaccgactccaccaccgaccccacccagctgagcgccaagaccggcgatgatgcgaactccgagttcgcgctcggcgaggccgccttctaccagaacggcacctgggcttggaccgacctgcagaaggccggcatgaaggccgaatccgtgggcatgatgccaatctacaccggtgtcaagggtgaagagaagcagggcttggccactggttccgagaactactggtgcatcaacgacaaggcctccgacgccgacaagaaggccaccgaggacttcctctcctgggtgatcacctccgacaccggcaagaaggccatctctcaggacatgggcttcaccaccccgttcaagaccttcgatgacgtcaagtttgacaacccgctgaccgaagccgccgtggaagaccagaagtccggcacgacccaggtttcttggaacttcaccatgatgccgtccgaagagtggaagaacaaggtcggccaggcactgctcgagtacgcgcagggcaccggcaagtgggatgccgtcaagaccgccttcgtggacggttgggcttccgaatacgaggcttcgcactgagtctcatagagtcccatagccgataagtaacaatccgcggcgcccctgccatttccttctccggggggggcgccgctttgtattgctgagtctcgcacaaaatcgtccgccgcaaaaaagtgtgaggcacgcacccgctcaatcgcacactgtggggccatgaatcggcgatttttcgccattctccacaatgtgcgattgagcgttactgtgcggttgcctcacactttttctatggtgggctttgttgtgtgagcctacttaacgcgggaggtggaggagcggaccttcagctgggccgggaacacgatgtagggttgctcaatcggcttttcgtcaatgagatcgagcgtcatgcgggctgccacgcgggccatttccaccggatcctggcggatggtggtcaggccgatatcgccggtgtagaaactatcgtcgtagccgatcaacgagacgtcgccgggcacggagaatccattgcgctccagctggaacataagcggcaaagcaatgccatcctcctggcatgcgatggcggtgggcatctcgtcttggcttatgagttggttgaccacgtcgctgatttcataacgtccatcgtcatcgaccttgcagacgataacctgcggctcgatgccttccctgcggcagcaggcggtgaatgagtcgaatcggctttgcacggagaagctcagcgacacctcgcgattggtgctgatgtaggtgatgcggcgatgtccgagattgataagatggcgggcggccagcgtggagccctgcacatcgtcgatattgacggcggcggtaaagccgcgggcttcgggttcgactgaattgatgccgacgatcggcacgccgaccgaagccagttgcgcgatttcgttgttgtcgatatcgaaagacgccacaatcacggcatcggcgttacggcgtaccggcaacatctcgaagaattccttgcgctcctcgatgctggaaatctggaataccgaaatatcgtagccctgcgtgtgcagcacctcgttgagcccctcgatgaccgaggcggtgaaccacaggcggatatggccgctcatcagtactgcgatgcgcagggagcggccggatttcagggccgcagccgagcgggagagtgagaaattgagtttgtcggcgatggcgagcacgcgctcgcgggtcttggccgacaccagatccggcctggtgaaggaacgtgagacggtggagatggagacgccggcctcgcgggcgacatcctgaatgctcgtagccattgcagcccccttgcgttgaatggaaaatcgcaatacacatgcacaactgactccagtgtacatgctgattgattgatctgcggcgatgacaacgattgtattacaaacgtttgcaaagtgtctatgtcggcgttagattggctttatatagccattatcttaggtgaaagaagattgctggagccggagtgtgctcgaacttgaaacgcctaaaatgacaacgtttgacatataatgattcgacgtttactatgaacataggcttgaacgagaacaggccgtgcatgcggttctcgatcggcaagctcgcattgagttgaactccgcagccggcgcacgatgcagtgtcacaacgcagcggactcaaggaggaggaaaagtcatgatcagcatggctggcaaggcgatacgcagatggtgggcgctgttcgcgctccccacattcgccgcattcatcatcgggttcctggtgcccttcatcatgggcgtctacttaagcttctgcgaattcaccaccgttaccgacggtgaatgggtggggcttaagaactatggcaaagcgttgaaagacaaggaattcctgcacgcgctcggcttctccaccgcgttcaccatcgtgaccaccatcgtgatcaacgtgatcgccttcgccatcgcctacatgctgaccaaggcgatcaagggctccacgctgttccgctcggtattcttcatgccgaaccttatcggcggcatcatcctgggctacatctggctgctgctcctgaacggcgtactagcccactggggccgcgccctgacctataaggcgtcctacgggttctggggcttggtcatcctggtgtgctggcagcagatcggctacatgatgatcatctacatcgccggcctgcaagccctgcccaccgatgtgctggaggccgcggccgtggacggcgccaacggacggcagaccatgttccgcatcatcatcccgctgatgatgccgtccatcaccgtgtgctccttcctgaccgtgaccaacggtttcaagctctacgatcagaacctcgcattgaccaacggtgcgccgagcaacatgtctgaaggtctggcgctgaacatcacccgcaccttctacggccgtatgggctgggaaggcgtcggccaggcgaaggccgtgctgttcttcatcctggtcgcggtcatcgccctgattcagaacaagctcaccacgagcaaggaggtggcagcctgatgaacgagaacaagcctgtgaagcatggcgcattatggaccgtgctgtttgccgttgtctccctgttctggattttcccgatcgtcctggtgctgatcaactccttcaagcagaaggcgtacatctccaagaacgcgttctccctgcctgccggcaaggcgttcgtgggacttgagaactatgtgcgcggcatcgagaccacgcagttcttcgcctccttcggctggacgttgcttatcaccgtcggctcggtggtgctgattctggtgtgcacctcgatgtgcgcatggtggatcgtgcgcgtgaacaactgggccgcgaagctgctctacaccctgttcctgttcaatatgatcgtgccgttccagatggtgatgttcaccctctccaagatcgccgacatgctgaagctcaataccccgtggggcctgtgcatcgtgtacctcggtttcggtgccggtctggccgtgttcatcttcaccggcgtgatcaagggcatcccgcaggaacttgaggaatccgccatgatcgacggcgcgtcagtgccgcgcatcttcttccagatcgtggtgccgattatgaagccgtcgatcgtctcggtgggcatcctcgaagccatgtggatctggaacgactacctgctgccgtacctgacgctcgacctcggcaagtacaagaccatctcggtcgccgtgcaatacctcaagggcggctacggttccgtggatatgggcgccatgatggcctgcctggtgctggcaatcatccccatcatcgtcttctacttggtatgccagaaatatatagtctctggtgtcatggcgggcgcggtcaagggttgagcccgacaatttggctcccctccctgaggggagccaaaagctgtacaaggagtagttgatgaactggctggcaccggactcgaaattcatgcgcgcgtggagcaatcttgttgacggcgtatggatcaacattctgatgctggtcacctctattccgctcatcaccatcggtgcagccctgaccgccggtcatgatgcttgccgccgctccatcgagggcgagggcaaaggcgtaaccgccaactacttcaagtcattcaaagccaacttcatcaaagccacactgctgtggatgccgttcttggtggcgctgattgcactggtctggtcatggatcgtcctgcagatcacgccgctgctcatcatcaaattcgcgctgaccatcctctggcttatcggtttcgaatgggtgttcgcgcttcaggcacgcttcgagaacaccgtggccggcaccttgaagaacgccttcatcttcggcatctcccacatcgcgatgaccgtggccctagtcatcgtggatgccgtgttcgtgacgctgctggtggccagctggttctacatgcccggtggactgttcctgctggtgatccttggttacggcaccatgctgatgctccatatccccgtcaccgagcgcgtcttcaagccatatctcattgactaggcgggttctctcgcgaatatgcggcgatcttcgaggtctgagcgctctctgtccacgcaagcgcggtaaagataacaaattgataacagtttggggcggctggcggagcggggtgccgattgaggggtattagtgattggcttggaagggggcttttggacatacggggggtgtgttcgggctgggcggctgcccccgtaagtgcttatatgcataaggaatctggcacactgagtctcagtgccgtaatggtatcatcgcaaataatgtttgcgttcacgtagaggcgaacgagacgcccgacaagtgggtcgaggcaaaggacaaggagagatacggtgaagcattggaagaagatggcagcatcgttgattgcaatatcaacgatggtggcagtagttccgacgacgtatgccatggaatcggaagattcccaaccacagacaaccgataccgcgacagtgcagactactaaggctgctgaaccgacgctgctcgccagctgggacttcacgggcaaaaacggcaccacgaacagcgcgattgccgattcgaccggcaagtacaacctgacgctgaaggacggcgccaagatcgaacagtacggtgaccgcagcaacaacgaggcgctctcactgcgcggcgatggccagtacgcccagatcgatgaccagctgttcaaggatgcgggcgactccttcactctggagttcgcgtccaagactcgtcacgacgacagcggcaagttcttctcgttcatcgtcggcaaggacggctcgaacgacgccaacaccaccgatcaggccaacgccaacaagtacctgatgttctacaacagcaagaccgccatcaagggcgttatctccaacaacaactggggtaacgaacagggatccaaggtcaccgtttccggcaacgacaacagctgggccgattacaagattgtcgtggacggcaccaaccttgccgtgttccgcaacaatgccctgattattttcaaggccaacaccggcatcaagatgagcgatctcggcgcgaccaccgcctacatcggcaagtcgttctactccgtcgatgagtactggaatggtgcaatggatgacatcaaggtctacaggggcgctgacctgaccatgccgaccgccgttgcgatttccggcaccggtgtggtgaacaacaagctcaccctgattgagaaggactccaccaagctcaccgccaccgtcactccggacgacgccgtgagcaagaacgtcacctggtcctcctccgatgagtccgtggccaaggtcgccgcagacggtactgtaaccggcgtcaaggctggtactgccaccatcaccgccaccactgagctgggtggtgtgaaggccgaactgcccgtcaccgttgagccgatgaacgcccagaacgccgccgcagccgacctcgatgccgcgattgctgcgctgaaagttccggcggccgagaatctgccgctagtcgccaagggcaccaagaacggctcggcgattacgtggaagtcctcggacgagaagctcattacgtccactaacgagaagtacgaaaacaagaccactggtgccgatgacccgtatcgtggtgctggcatcatcaatcgtccggcctacggcgacggtgattccaagccggttacgctgaccgccaccgcttcctacaacggcggtgagaaggtcaccaagaccatcgaggtcactgtcaaggagaagacccgcatcgcgcctgacaccggctatgcggccgtcacttttgagagcgacagcaacggtggagaaaaggcctgggtggcttccactgagaagaacgatttcttcacgtttaagactcgcaacaatggccaggcggtacttaccaatgatgcagacacgggtggcttgcgtgacatgttcgtgctgcgttcccacgaaggcgacaagtactacctgattgccactgatctcaaggtctcgtcaatgggctggagccagaaccaggttaacggttctcggaaagttgaggtctacgagtccaccgatatgatgaactggacccgtaccaacggcgacggcaacggcggcatcaccatcaacacgccgaacgccggtatgacctgggcgccggaagcttactgggatgatgacctgaacgcttacgtggtgttcttctcttcccgcatgttcactgatgacacccgtaccactccggtcaagaacgacaaaaccggcaatagctcctatgctcaggtgcgttacgccatcacccgcgacttcgtgaacttcaccgagccgcagatgtggcaggacaccggctactcgcgcattgattccaccgtgcgtaagatcggtggctactactaccgattcaccaagaatgagcagggcggtgccgctggcgattacatcaccactggtaagagcatcttccttgagcgttccaaggtgctgactgcaccgaccaccgaggcatctccgggtcaggacccgaacaccggttggcagctgctcgagcaggcgttgctgccgttcgaaggaccagagaccatcaagctcaacaaggatgacgaactcaacacgaaggacgacgacggctacattctgctgtccgacaacttcgcctaccgtgcatttatgaccacgggtgccgagctttccaagaccacgtgggacaacccgatgaccaagcgttacccggacttcaacaacgaaaagaagccggtcaaagccgagccgggcgctcagggctacatcactcagggtgctaacggcggtctgccggacaaggtgcgtcacggtgcgttcgtgaacgtgcctgagtctgtgctcaaggtgacgaagtcctggaccgctgccaacccgacgcacatcgaggctgttgactccaccaccaaggccgtgtacaacgccggcacccgcgagctcaccgccacggtgaccgccgccgataagggcacgctcgccggttcggtgaagttctctgctggcgactggtccaagaccgtgaagctcgacgccgaaggcaaggccactgtgaccctcccggccagcgtctctggcactgttgcggttgcttacgacggctacaccgatggtttggtcaatccatccgatactacggttgacggcattgaacagggcaaggtcgatttggctgagctcaacaagcagatcgccgccgccgaagcgctcaaggaatccgactacacggccgattcctaggctgcgctcgccaaggcactgcaggtcgccaaggctgcgctcgcttcctccgaccaggctgtggttgacaaggccgccgctgatctgagcgccgccatcgcagcattgcagaaggcggaaacgcccaccaagccggataccggcgatggtgacaacaagggcgataacgcaggcgacaagaccgacaacaagaccgatgacaccaagtctgacggcaagttgccggccaccggtgccgccgtatatggcgtgagcggtgccatggtgctgctcgccgctgccggcattgcgctgtccatctggcgcaagcgccgcgcataactgagtagctgctcactgcaacgcacagaaaatcgcacagtatatgtgtgattttctgtgcgttttaatgtataacagcacatgcgtcatttttttggctattcgctgtttgtggtgggtgatggtcaagtggtggtgacggctttgaggtcgagtctgccgcaggtcaggtagatcatggtggcgaagtagtccatgttgcggaagcctctcgcccgtcgtttgacgttctggatgacgctgtcggcgccctcgagcacggcgttggtgtacgggtgctcgaagtaggcgacgatctcggcgaagtggcgtcggatcatgcgggcgaagtccttcatgggctcgagcctcgagtgcatcatccacgagcacaggcgatgcaggcgcacccatgcctcggacggggtgcggctgtccgtgtagatgtcctgcaggacctcgcgcatccggcaggcgcggccggtcttcaaccgttgcctcgtcaggttgcgcttggtctccacctgcagttcggtcaggctttcctcgttgcgcagccacaggtacttggtccgtttgagcagcgggttggagcggccttccgtcttcccggccttgtcgacggcctcgttggcgtgcctggccacgtggaacctgtcgacgatccgccgcgcatggggcagatgctcacggatgcccttccggaagcccaggctcatgtcgcaggcgaccagacgcacatattccgggaccccgttgtggtccatgaaatcacgcgagaaccgttcgaccgtggccgggtccttgcccggcgtcacgttgatgacatcgtgctccacgagatcggcgaccacggtgatgcaattgcggcccctgcggctggtctcgtcgatgccgatggcctccacacccatgtagtcctccagcctcctcgcctcgtcgacgtaatgggcgacggaccgccacaaacgggtgtcggtctcgtccaattgctcggcgagcgtgctgacgggcaggtggcgggccatctccacggcccacgcctcgaacaggagcgtgaacccgctgccgggcctggcccacggggcgggcaccggcatcaccccgcacccaaaccacccaccacaaacagcgaaaggccaaaaattagtgacgaaacacgaaacaccgacttgactaaaaacaccgcccgccggggcatgggtcaggctataccgcctgtgctcgtggatgatacactcgaggctcgaacccgtgaaggaacccgcccgtctggtccgccgccgcttcgccgaggtcgtcgcgtacttcgagcacccgtacgccaacgccgtcctcgagggcgccgacagcgtcgtccggaacgtgaagagacgggcctgcggcttccgtgactgttttgcttcaatgtttgttcgacaggttcggcagtgtttttccgcagtgtgggctgatggttttccccggtgtcgtcatcgtttcccggtgatgtgagaggcatcggtgccgcggcctgtatattcccgagttgccaatcggttttgattcggccggttgccgccggccggcgctcgggaaggaaaggaacatggcgataccgatgcccattgtgcaagatatcaggagactcgaccggcagggaatgtcgcgcgcgcagatagcgcgtcgtctgcatgtggatcgcgggacggtcgcgaagtacgcggatatggaggattgctcgcccaagccgaaggcggatcgcaggtacgggtcgaagatcgacccgtacgcgcatctggtggacgagtggctggaggcggatcggatgctgcccaggaagcagcggcacacgatcaggcgcgtgcacgaccgtctgctggcggagacggattacgacggcgagtattcgaccacgatgcgttacgtgcaccggtggcgcgaggcgaaccgcggcgtgccggatcgcgaggggtacgtgcggctcgagtgggcggcgggcagcatgcaggtcgatttcggcgtggcccgggcccggatcgctggcgagatggcggacgtgcattgcctggtggtctcgttgccgtattcgaacatgcggttgtgcgtggcgttgccgggcgagaacgcggagtgtctgtgccatggcctgatgctcgtgttcgagcatatcgggggtgttcctcccgtgatcgtgatggacaacgcgaccggtgccggccggcgcaacgcgaagggcgaggtcgcgttgaccggggtgttctccgcgttcgtggcgcattaccggctcgaggtccggttctgcaacccgtattcgggcaacgagaagggcagcgtggagaacgcggtcgggtttttgcggcgcaatctcatggtgccgcccatgcgcgcggaatcgtatgggcagttgagccgtctcctgctggagcggtgcgacgggctcgccagggactcgtattgcccgaggttgctggacgtgcccgtggccgaggtgttcgacgaggagagggccgcgttgatgccgttgccgtccacggcgttcgacccggttcgctgggaaagccggacggccgacaagtacgggctggtcgacatcgactcgaaccggtacctcgccggccccgattcggcgcgttccaaggtgctggccgcgatccggtgggacacggtcacgctcgcatcgcccgccaccggcgagctcttcgcggagtatcccagacagtacggacggtcgcgcaatgtggaggatcccgcgctcgtgcttccccggctcgcggtcaaaccccgcgcgtggcgggaaagctcgatccgcccggacgtgcccgacgatatacgcgcgtggcttgattccatggacgaaaagacgttgagggagagcctcaaagcgatcggggacgcgtgccgggcggccgggttcgatcccgcgatgcaggcgtgcggcgagatcctgcgctcgaacagggacatgggcctgcacgcggactcgctcacccctatcgcgttgcgcatgcgcgacggcgagtgggaataccccggcgggatcgaggagcccgacctgagcggctacgaccggttcatcaccggcacggacgacggaggggaagaacggtgagcgtcagacccgatccggtgatcccggagacccgacgcaggcgcgcgtccacgaccgagaagagcgagaggatcctgaagatgagccgcagcctgaccctgacacgcagcgtgctcgcgggcacgctcgccgaggccacgcccaaccagctcgacttcatcgaacgctggttcacggccgaactcgactcgcgcgagcgatccaaacgcctgcgcctgctcaaacaggccggcttccccgccgacaagaccctcgacggctatgactggaccaacctgaagatgcccgccgactgggggcgcgcgcagctcgagaacctcgacttcgtcgccggatgcgaggacctcgtgctctacgggcccgtcggcaccggcaagagccacctggccatcgcgatcggacggctcgcctgcgagcggggcgtcccggtgcgcttcttcaccgcgaccggactgctcatgcgtctgcgccgcgcccagcaggagaaccggctcgaccgggaactcgcgagcatcggcaaggcccgacttctcatcatcgacgagttcggctacctgcccatagacgaggagggcagcaggctcctcttccagatcatttccgattcctacgagacaaggagcatcatctacaccaccaacatcgaattcagcggatggggacgcgtgctcggcgacaagaacatggccgccgccctcatcgaccgcaccgtccaccacggacggctcatcagattcgagggccgctcctaccgaagcgaacacgccctcatgaccaaataaccaacacaacgcagacaggcagcggccgataccgcacaccctgcggaaaacccgctgcctacactgcggaaaaacaccgctcacaaagcggacgccaacttgctaaaacacaccgtggcatggactacttcgccaccatggtctacctgacctgcggcaagctcgacctcaaagccgtcaccacctccccctcagtgagagttttttgcaaattggcccgtacccgcacctcgtcacagcttgtataatcacgattatactaatcgtgatacaataaatcgtgatgcgatagaaatacgccggcgtatggcataaaggaggcgggcagcatggcattcatcggacgagacgatgacctcaagcaactgcaggaatgtttcactgagcgtagggcacagcttgtgttcgtctacggccgcaggcgcgtgggaaaaacagagacgcttattcaactcgcaaaagacaaggaaaccttattcttcgcggcgcagaatgccactaaagatgaacagctggcatcgttctcccgtctcatgttcgaggcgggtgccccgggcaaggattatctgagtcaatatccttcttgggaaagggcgttaaccgagttaacccggctgccagagccgagcgatggcggccgcaggcttgtgatattcgatgagtttccttatctggtcaaatctgatccgtcattgccgtcagtgctacagaatctttgggaccacacgttgcgtcatgcaaatctgatgattgtgatttgcggcagtgccatgagcttcatcgaaaaggagctgttgggagaaaaatcgccgctatatggtcgtgcgaccggcatcctgaagatgctgccgatgccatattgggatgcagcgcaattcttccccaactatagtggcgaggataaggcgctggcctacgcaatactgggcggtatcccgcgttacctagaggaatttgacccagatgagaccatagacgcaaatgtcaagcggcatattctgagacgcattgctccgctatacagcgaggttgaatttttgttgcacgaagaactgcgggaaactgcgaaatataacagcgtgatacgggcgatcgcgctcggcgcaacttcgctgaatgagatcgcgacacacacgatgatggcaaacgcaacagtatcgtcgtatctcgccaatcttatggaactggggattgtggaacgtgagttcccagtcacggcgaagcctaaggagcgggcgaaaggttcgcgtgggctgtatcagctgagcgacaatttcttccgattctggtattcgtttgtctttccgtatcgttcggaattggagcggggcgatgtggaaggcgtatacgagcgtcatatcaagccggtattacatgattttgccggcaaaccgttcgagggtctgtgccgtgaatggatgtggcgtgagagtgctgctggacggttgcccttccgtgcgcgtgcggttggccgttggtgggatcgtcaggatgagatagacgtgatggccgttgacaatgcgtctgatgctgccattgtgggcgagtgcaaattccgcaatgcgccggtggaccgttccgtgctgaatctactgcgagaccgtgctgcgcgaaccggtatcggccagcgaacatacctgctgttttcgctcggcggtttcgatcaatcactggtcgacgatgctgcggcgtctcaatccgacgttcagctcgtcggcatcgatgagctgtttcatgaataaatcccatttgcgaatagctctcactgagtgctcatcagtgagagctattcgcaaatggagccttacttcttcgcctgagtgagctggtaggcggcgaagaggatggccagccagatcacgccggcgatgacggcgatgcggtagctggtggagaagcacatcagcaccacgaccagcgccaggaacgccagcaccacccacggggtcaccttggcaaacggcagtttgaagtgaatcgcgtccagtgcctcctggccgctcagaccggccagctcggaatcctcgggagcgccgcccgcggcgaccaccttacggaacttcatttcggtgagcatgatcatcgtccagttgatgatgccggcaatggtggcaatcgacatcaggtagttgaacgcgaactcaggccacacgaacaccacgaccacggcgatggcggtgatcgcggcggacgtcagcacgccggccactggcacgccgcgcgagttgagcttgcccaagtaagcgggcgcattgccctgcttggccagcgagtacaacatgcgggagttggcgtacaggccggagttgtagacgctcatcacagcggtcaggcacacgaagttcaaaataccggcagccgcgtgaatgcccacggaatcgaagatctgcacgaacgggctggacttgccatcgatggtgttccacggcactacggccatgatcacacccagagcgccgatgtagaacacgaggattcgccaaataatatcattggtggcgcgcggaatcgtggtcttcggatcctcggtttcgccggcggtgatgccgatgagctcggtgccgccgaagctgaacatcaccacaaccagtgccatcagcaggccggtccaggaaccgtcggaattctgccccatcaggccgttcgggaagaagccgttacccacggtgaaccagttcgcgaagcttgcgcgcacgccggatgcggtgggcaggacaaagatgatgacggccaggccgccgataatcatggcgatcacggccacaatcttgatgatggcgaaccagaactcgaactcaccgaatttagagacgcccagcaggttggcggcgcagatgatcaccaagaacacggccgccgacacccatgtcggaatcgccgggaaccagtagttcacaaacgaacccaccactgatagctccaccatcgagacgaggatgtagttgaaccagtagttccagccggaaataaagccggcgcgcttggaccagtagcgggtggcatagtagctgaacgcgcccgccttcggatcctcaacggacatttcagacagtgcacgcacaatcgcgaaaatcgcgaggccgccaaccaagtaggcgagcagaatcgagggtccggccagcgcgatggattcactggaaccatagaacaggccggttccgatggcgccgcccagcgcaatcagctggatgtggcggtttttcaatgacttgcgcagcgtggccggcaccggcacgtcgtcggtttcgcgcggcttcttaggcgcatcagtagtactcattgtgctcttctctcacatttcttgggtttggcgcacgcggggcttgccgtgatgcgcaacgttcgttattctatgccgccgtatcgtctcagaaatggtcaatcgtctatttgtgcgctattgcaagcgcgggcgtgggcgcggccggtgagcaggcgaagctatagcgagcgatgcttatgaaaccgcacgcttcactgagttcactgaattcactgtgctcactgcgtggcaggcgtacacatggtgaagatggtgtgggacaccgattcgggagaggccgcgagatcggtggcgagccagtattgcaaaagcccaatgctgccggacacggcgaatcgcatacgcatctgcgcctcggctgggtaacccgccgaagattgcaactgttcgcctacaccgcgctggctgtaaatcaatcccagcagctgctgctggaaaccgatatccgctttcgggctcatcagcacttggagatgattgcgattgtcggcaatgtactggcagatgcgctcaataacatgctcgatgccggcaggatctggctgggcgagtagctgttcgagtgcggtggtgacccaggccatggtttcgtcttcaatgtcgtgcagcagttcctcgatgctcgcataatgcgcgtaaaacgtggaacgattcacatcggcccgctcgcacaacgctttaacggtgatggagccgagcggctgatcgcgcagcaactcgataagcgcgtcctgcatggcacgtctcgtgtaacgggtgcggcggctttccgtcaattctttggacatggccttctccccaagttccgacaacccacaatccaactgttggttgcagaaccgacacagtgttgttttacttgagtatagcaggaagttctggcggggcctatggggctaggtggctgccacgagcgcgttggaggtgtgcgatggcgtatatcgaattcgaccatgtggtcaaggaatatccttctggcagcagtgtgattcgcgcgctcgacgaggccagcttcaccgccgaacaaggcgaattaagcgtgattctggggcagtccggtgccggcaaaaccacggcattgaacattctgggcggcatggataccgccacaaccggccgcgtagtggtcggcggacgcgatattacgggtctgcggaaaaaggaactggtgacctaccggcgcaacgatatcggcttcgtcttccagttctacaatcttgtgccgaacctgaccgcgctggagaacgtggaacttgcctcacagatttgccccgatcatttcgatccagaggaaacgctgcgcaaagtcggactgggggagaggatggacaacttccccgcgcaactgtccggcggcgaacaacagcgtgtatccatcgcccgcgcgattgccaaaaagccgaagctgttgttgtgcgatgagccgaccggtgcgctcgattacgagaccggcaaggaagtgctgcagttgctgcaggatatttgccaaacacaaggcatgaccgtaatgatcatcacgcataattccgcgcttgcgccgatggctcataaagtgattcgcttccgctccggcaaggtgaccagcgaggaggtcaacgcaacgccgcagcccatcgccgatatcgaatggtaggtgattggcgatgctcgctgcaagacactctgtgaaacgtcccgtgaaacaagcgaggcgattcgtgaaacaacctgtgaaacagtctgtgaaacggccgaacctcgacgataacggcggtcgaggagcgggcgtttctgcggtatttgccaaagacacgttgcggtgctggcttcgcagctggaagcggttcgtctcgatcgccgtcattacgctgcttggcgtggctgtgctgaccggtatctacgccggatgccgcgatgcttttctggcggctggtcgtttttacgatcagcagggactgcatgacctgcaggtgctatccacatacggcctgaccgatgatgatgcggcggcactgcgccgaatcgacggtgtgcaaaccgtgcagcccgaacgttctcagacggtgaccacgttggtggacggcaccaagaaaaccgtgaccatgcaggaaatcggtaccgaagggcttgatcagccgtacctgcaacaaggcaaactgccgaacaaggccggcgaagtggcggtgactcagcagttcctgaacgatagcggactcaagattggcggcaccattactgtaacgccacaagacacctcttcatccgtcatatcggtagctgccacggagactgacgattccaaaaatgacgattccagaaatgccgattccgatgatgccgacacagtaggtgccgccgccaatgcctcggcatccgatgcgaagtccgacgccaatacggacgccgacgcagaacaatccccgcagttccccacgaaactcaccatcaccggcgtcgtgctcgacccgcgcgacctcaacaatccagacggctattcgggcatgacctccttccggtccacctcatccgaggactatacgttctttgcacccagcgacggcgtgaccggcgatatatacactgcgatatcgattgccgtcactggtgcgtccgattttgacacgttctccgatgcctatgatgaagccgtcaaaaccgtggccgaccgtatcgaacatcagatacagaccacacgccagaaagcccgccgccaacagatcgtctccagcgcgcagcgcaaactggatgatgccaaagacgaggccaacgagcagctggacgaagcccagaaacagatcgacgacaactgggccgagctggaagccaacaaaacgacattgcaagatagccgtaccgaattggagaacaacaggacaaccattaccgatggcgaacggcagctcgccgatggacgtgcgcagattgcctcggcccgtcaacagatcgcgcaaggtcgccaacagatagccgaagcgcgcacccagctcgaatcgggcaaagcgcagctcaccttggctcgcaaacagctcgatgcggcgcaaacggaactgactgccaatcgcacgaaaatcgaacagggcattacccaaatcgaccaaggcgtggcgcaaattgatcagatgctgtccatgatccaacaggccaacaatctactggcgcaacttgacccgaatatcgacctcaactcacccacatggcaggccatcaagcaactgcttgcacgccttggcattaccgtgcctgaggtgccgtcaatcagtgatttgcggcaacagctgaccgccaagcaaacggaactgcaagcgcagcgagacagtctggtccagcagaaagccgatttgcagcgcacattaaacgaaaccattgcccccgcacaatccaccttggaccagcagaacgcgcagctgaccgccaaggaacaggaagcggctgcaggagaggtacagctcaataccaaatccgcggaactcgaagcgaatgccgcaaccctcgaaacccagtcggcgcaacttgaagcgcaggccgcccaactggccagcggcaaacagcagctcgaaaaaggcgagcggcagctgaaagaaggcgaacaacagctcgcggacggcaaggcgaaactggatgatgcgcagtctgaactcgatgcgaagcgaagcgaagcggaaagcgaattcgccaagcagcaacggcgcatcgacgatgtggccaacgcacgttggtatgtgcagacgcgcgcttcgatcgacggattcagctcgctcaaatcagacgtcagttctatcgaatccatcggccgcgcattcccgattgtgttcctgctggtcgccgtgctcatgagcctgaccaccatgacccgcatggtcgaggaagaccgcggacttatcggcacctaccttggactcggctatggcggactcgccgtgtccagccggtatctgctgttcgcgttgctcgcctgcttggtcggcggcggcatcggtctgctggtcggattccttggcatcccggcattcctgctggtggtgattgagggactgtatatattgcccggtgtgcgactcgaatacgactggctgtacggttcggccggcatcgtgctgttcgtggtcggcgtgggcgtggccaccgcgctcgcctgtcgcgaggagatacggcacacgcccgccgcgctgatgcggccgaaggcaccgaaagcgggcgctcgcatattgctggagcggattcgcccggtatggagccggctgaacttcctcggcaaagtcaccgcgcgcaatatcttccgattcaagtcgcgcttgattatgaccgtgggcggcgtggccggttgcacagcgttgattatctgcggatttgcgattaatgacaccgtcgacacgattggcgtcaaacaatacgagcagatctaccagtacgacctgatggtcgtggccaatgacgatgacgccaccgcgatgcgcaagcaggtggcacaagatggccaaaccaccgaaacgctgaatctgcgcgtggatagtggcgagatgagcaatgcggcgcaggaaagcgaaaccgtgcagctgatgaccgtgcccaacgattcgctgaatatcttgaacgatatggtcacgctggaacaagctggcgatgatggatggtttgggctgcccaatatcttcggcaaagcgggtggcggcactgtagcgctggacgatagtggcgtgattgtatcgcagtccgccgccaactcgctgaatattcatgccggcgacaccgtcacgctgggcaatggcggtagcagccgggccaaggtgcaggtcacggccgtgacgcgcaatcttattggctctgatgtgtacatcagtgagcgactgtacgaccagaagtttgcggccggcggtgtgacgtcttcggcttcgggagatggcactgcctcgaccttgacgtggaacgcgatgctcgccaagctgaaaggttccgagaccgaacaggccgaatatgcggatcggttgggcgaggaatcgtcggtgctcaaggccgtgagctgtgcgcatctggccgccacgtttaagttcgatttgatgggtgccgtggtggcgctgattgtggggctcgccggcggcctggcgctggtggtgctgtttacgttggccaatacgaacgtgtccgaacgcatccgcgagatggccacactgaaggtgctgggcttctatgaccgcgaggtgcacaactacgtgaaccgcgagatgatgatattgaccggtatgggtgtggtggttggtctgccgcttggcaggtggataggcggattactgactgctgcgttgaatatgccgtcgctgtatttcgaagtggaagtgcactggtacagctatgcgattgccgtggtggcgacgctggcgttcgcgctgctggtgcagctgttcaccaacccagtgctcgatcgcgtggatccagtcagctcgctcaagtccgtggaatgaccttgctgagccccctctgtgagggaggtgattcgcactaagttcaatttggtgttggcaaattgaactttttggctgaatatttacagtatcattgcatgtgttcttgagctgagcggttttcgtgacatatttcggtgatacagtctgaacttgtcttgaacgagtatcgcgtccggtgcgtaacaatcgggcggcagagaagagaaatgaaattagtatggccgatacgaatgtgaatggtggtacacagcaggctacgggcaaactcaagtctgtcgaaagcctggaccaggccaacgagatggagcgtggcctgagcaatcgccacgtacagttcatcgccattggcggcaccatcggcaccggcttgttcctgggttcgggcaagtcgatttcgctaaccggcccctcgatcatcttcgtgtacattctggtcggtatcatcatgttcttcctgatgcgcgccatcggcgaaatgatgtaccgtgaccccagccagcacaccttcatcaacttcatcacccgctacctgggcaacggatgggggcacttcgctggctggacgtactgggctgcgctcgtgctgctcggcatgaccgagatcacggccgtctccacatacttcatcaccttcttcgacacgttcggcatcgacctgacccattggaaatggctgatcgaactgtgcttcctcgtggtgctggtctccatcaacctgattgccgtcaaggtgttcggcgaggtggaattctggttctcgatgatcaagatcacgctgatttgcgcgatgatcgccaccgccgtggtcatgatcgtgatcggctaccattacccagccgtgcagattcacggcgtggaccacgtgagcccggccggccacgccggattcgacaacctgttcgccaacttctcgttcgcgccgaacggctggatggccttcctcatgagcttccagatggtgttcttcgcctacgagatgatcgaattcgtgggcgtcaccgtttccgagaccaagaacccgcgcaaggtgctgcccaaggccatcaacgagattatcgtgcgcgtgctcatcttctacgttggcgcactgatggccattatgtgcattgtgccgtggacctcgttcaagccgaacaaggacggctcctttgcctccccgttcatcatggtgttccagtacgccgggctgaattgggcgtccgcgctggtgttcttcgtggtgattaccgccgcatcttccgcgctgaactcgctgctgtactcggctggccgccacctgtaccagctggccggggagtcgccgaacccgacgctcaacaagatcggtcaggtgtccgaccgcaaggtgccggctcgtgcgattctggtgtccgcggtgctgattctgctttcgccgattgtcaacgctattcccggtgtgtccggagcgttcgtgctgttctcgtccgccagctccgcagtgttcctgtttatctacattctgacgctgatggcacaccgcaagtaccgtcgctccgctgatttcattccggacggtttcgtcatgcccgcctggaaggtgctcaatacggtggcgattgcgttcttcgtgttcatttacctgacgctgttccttgcggacgatacgcgcaactccgcgattgccggcctggtgtggcttgtgggcttcggtgggttctcgatgctgcgcgagcgctaccgtagccgcgatttgaaggtcgcgctggaacacaaggagatttgacgggctgtttgctgacggctgttagtggctggtggtcggctggctgttagcgacttgctagcggccagcagctgatggctggtcgtcggcaagctgaccgcatataggtctcattgatgcattcggtcattcaattcgtgcattaggacatcgaattagtgcattaggacatctgattagtgcatgagtgcgcaaatattagtacatttaggcgcttaattagtgcattaggacatcgctattcatacattaggacataggggatgtccctaattatgatgcgatgaagataaacgtcatgtctgaatgtatgaatatatccgcaatatcgcaacgggcattacagccggaatggcagcacccttgtcagaggcgctgcccattcctattttggtggggcggcttgtgactcttgcagggagtctaagtctttgagcctgtttgttgggtgatgattttgtgctaaaatttggtcatatcagaatgtttgcgcaaacattctggctgcgccggaaaaagagccggcgtaggccgtatatcaggcaaagaggccagcgcagtgaagcaaaggccgattttcccggtatgaggcggatagcaggaacactaaggagaccaatgaaggtactgggcagatcgcttgctgcaatggttgcggcggcaacactagtgggaggaggggcgtttgcggttgccggcactgcgtatgcggctgataacgatgccattaccgtgaccccgaacccgtggtatgccaacagtttcgatggctggggcacctcgctggcttggttcgccaacgccaccggcagcctcggcgaggaatcggccatcaccaccaatctcggcgatgacgcttccaaggctaaggctgtggaatacggcaaacagctgcgcgaacagttctaccagtccatcttcggtgatgaaggactggacctgaacatggcccgctacaacgtgggcggcggcaatgcctccgatgttgcctacggctacccattcatgcgccaaggcgctgccgtgcctggcacgtggaaagatgacgccaccggctccggcacgtatggcaatggcgtaaccaccaagcaggccgacaaagacaagctggctgcggcattcgacccgactgacgacaaccagtatgacttctccaagtccgccgcccaagactggtggattgagcgcggtgccaccggcgataaccctgacatcaccgacgtagaggccttcgccaactccgctccgtggttcctgaccaacagcggttacgccactggtggacgcaactccggtagcaataatcttgcaaaccctgagaaattcgctcagtacatggccaagaacgtcgagcacctcgaaagccttggcgcaaacgttgacacggtcgagccgttcaacgagtccgagaccagttactggggcactccgggcgacatggcttcgaagtacaccgatgagagcgatgacaacaccaagctcattaacaactactgggataagtactactccgacaaagataagtccgtcaccccatactccaacgcgctgaagaagccgcaggagggtatgcatgtcagcaacgcccagcagcagcagacgattaccgcactcgctgaggcgctcaaggacaatgatgacaccatcatcgcagccaccgatgccacgaactccgccgacttcgtcaagtcgtacaaccagtacccgcaggcgatcaaggaccttatcggccagtacaacgttcacgcctactccgacagcaaccagatgcagtcgcgcgatatcgctcaggcagacggcaagaagctgtcgatgagcgaggtggacggctcctggcagtctggctcctacaacccgtacggtttcgacaacgcgctgggcatgatgagcaagatcagctccaacgtcacccgcctgcagtccaaggacttcaccttctggcaggtggtcgaggacctctacaacatgcagatgggctcgaatgtgaatccggccggtgagaacaccaactggggcaccgtgctcatcgacttcgactgcaccgtggctggcatggacggcaagctctactccgagcgccgcgtgaacaacaacggcggaaccaccgaggggctcgctccgtgcacggttatcgccaacgccaagtacaacggcgtcaaggccatcacccacttcatccacgcgggcgacaaggtcatcgccaacaatgacgaagacaacaacatgaccgccacctccgccgatggcaagacgcaaaccgtcgtccaccgcaactccggcacctccgatcagaccttcgtcatcgacctgtcgaagtacggcgagattgccgacaatgcttccggcgagctctacctgaccaccgaaacctctgccgaagacaagaacgcgggcgtcgattccgccaccccggaagtcttcgccaagaccagcaatgtcaagcaagctgaaggttctgtggtgattgacaaggctgccaagaccgctacggtcactgtgcccgcccgttctatcgcctccatccagctcactggcgtgaccggctacgctaaggatgctgccgtcgagaccggcgacacttaccagctcgttggtaagcagtccggcaaggccgtggctgataccacttctggtgattccgcgctgtccctggccaacgtcgcttccgatgccgagaacgccaagaagcagatctggacctttacccagatcgagcagcccgccgactccgagcgccctgatctcaaggcttatgtgattaccaacgccgaaggcaaggtgctggtttccaaggacggcacgaatgcgctttccgacgagacggttgaggccgccaagtccgacccggctgccaagtggattctcaacacttccgatggttcgacctaccagctgctcaatgctgcgactaagacgaacctcgatgtggataactctggcaccgcagttggcacgaaggttggcctgtggcaatcgccgagcggcacttcgccatccgccaatcagacctggacgttgcgcaatgtaacgcctaccggccagaaaaccgtgaacgtgcagaccgccgttaacgagaaggccgcgctgccgaccgaagtcacgctctactacacctggggcgaaggcaaggccacggtcgccgattgggatacttccaaggtcgatgtggccaaggaaggcacctacgaggccaccgccactgccgccgacgtatacggcaatgagttcaacgtcaccgccacggtctacgttggtgccttcactgtttccgatccggtatccgccacagtgctggccggcaccagtgcaagcaacgccaaggctgcgcttgaggctgagccggtgtacctgcacgtcaaggcatcgcctgcatttgaaggtgatgcggctaaggttacttggaacttcgatgggcttgatgccaagctcgccgaggccaaggctggcgacaacattgccgtggccggtacctaccagctggacgacacgaccacgattgcgctgaagggtacgatctatgtcaccgccgccacgcctgagaatgtggccgacactgcttccaacctgactgtgaccaaccagcagacggaatacagcaagggcgaccagtggaagaagctcaccgatgacgatacgtcggccgaggcttgggtgacgtggaacgcaaagaatgattactctgccagcccgaccgccacggtgaacttcggcgaagagcgagaagtcaccggcctgaccatcacctatggtgacaaggctccggcatccgccaaggctgagtacaccactgatggcaccacatggacgcagttcggcagcgaggtcaagcccaaagccgggcagactgttacgttcactcctgaagatggttcactcaaggccacgcaggtgcgtatcgtcaacacgcagaacggcgacttcatgaacgctaccgagatcgaagcctttgtggttccggttgtcggaggcgtgaagaacatcgccgcggcctctggcacgaacttctcggtgaacttccaggagggtgcctccgcttccaaggccatcgatggtgacactacgtcaaagggttggtccacttgggcttccaccgcctcgacggtggacccggtcgccacgttcaccttcgacgaagctcagaccatcaccgaagtgaagaccttcttctactacgatggtcgtgcgtcttggccgaagagccagacgctggaataccaggatgaggctggcgaatggcatggagtcggtaccaaggatggctggaagacacaggccggcgatgccggctctggctccgacggcatcaccgccgccgacaccccgaccgttgacttcgtgctcgacaccccggtaaaggccaaggccatccgcctgaccaacacgttgcaggacaccaaggtgtacatcaacgtggctgagatccaggtgttcgcacaagacaacaaggtgattaccccgcagccggcatccgatgccacgctgggcgacctgcgtcttgacggcgagaccatcaagggcttcgctgctgataagaccgactacacagttgatcttccgttcggtgctgaggcaaacccggtgctgcaggccttcgccaccgacaatgccgccgccgtcaaggtgactggcgacgcggttgagaacggcaagcttggcggcaaggccgccattacggtgacctcagccgacgagtctgagacgaagacctacacggtgaccttcaacgccttcactttggcttcgctcaaggtgatcggacccacgaagaccgagtacgccatcggcgacaagctcgataccgccggtctgaaggtgactgccgtctaccagagtggcgacaagaccaaggaagtgccggtcgctcttgacgacccgcagcttgcgattggctcgttcgactccaccaccgcaggcaagaaggcgattaccgtctcctaccgtggtgtgaccgcgaccttcaacgtcacggtcaaggccaacgcagtcgcccctggccctgaagaacagaagcccggcagcaccaacaagcccggtgccaccggcaacggcaacaagaacacggtggccaacaccggttccaatgttgccgccatcgctggcgctgtcgctctgctggccgctgccgcgggtgcattgttcatgctgcgcaagcgtgcatagcaccctcgcacagtaatgggggaaggaacaagccggcaatattgactattgccggccggttcctccgctctttgagcataattggtccgacaagttgaatactgagttttcagtatcggtatattgatttgtcggcccttttctgacttcgcggatagcgacataactgtttgttcaaaaaaccgttatcaccaatcaaggaatcaaatcaatgaagttaaacaataagggcaagagcgctcttatcgcggcaattaccgccgcggcaacgctattgtcatgcggactggccgcttcaagtgccagtgcggcaggtgtggattatctgcccaccatcggccaagtgccggcatacaccaagttccagcccacagccgatccgggcaagaacgctagcgattacttccagccatattggtatgccaagaatgccaatgataatggcggcacacacatccaagcgcatggtggccaagtggtcaaggttggcgacgcctactactggtatggcgaagaccgttctaacggttacgacaacagccccggtgttcatgcttatatgtcgacagatctatacaactggaccgaccttggtgtggcgctgcgtgcggtgaccagcaaatctcagttgacggataagagcaatgccgattacgcctacttcgacaaggcctacaacctgaccaagtccgacggcagtgtggacactgccaaggccgacgcaatcttcccgtacctcaacaccaaccccgatcaggatggtgatggcgcggttgattccgtacagggcattttcgagcgtccgaagatcatctacaacaagaagaacaagcaatacgtgctgtggtggcattccgatggaagcaccacgccgggcggttccaactatgcacgtgcacttgcgggcgtggctgtttccgacaatccggcgggcccattcactatggtgggtgcctatcgtttgcctaaccagaacaattggaaagaagccgcaggtaaccccagctggggtgagaacggtgacagccgcgatatgactgtgttcgtggacccgaaggacgacagtgcctatgtactgtattcttccgaagccaatgccacgctgtatatcgccaagcttaacgatgattacaccaatgtagtcaagaccacgaatgtggaccagtccgagggacaaaagcagtactctgctgacgggcagtacccatacattcttgcagacggtactacggatgccccggtgcgtggcgaagatttccaaatcgtcaaacaaaatggttcgctggaagctcctgccgtattccaatatgacgggcgttacaacatcatcgcatctggtgcaaccggctgggacccgaacaagcagacctactacaccgccgactccatgctgggaagctggacccgtggcgtggaaaaggacgatgccaacgagaacacgtggtacaacaacatgccggaaggcgcggatggtctgttgtctgtgggcgatacccgcggcaccacattcggttcgcagtcggctagtgtgctcgcagtagaccaggagaaaggtcacttcatctaccttggtgaccgttgggattccggtaaagccgattccacctatgtttggctgccgctgaccatcggtgagaacggcaccatcgaaatgcataatcctgctcaagaaggcgagcccgacggctgggatctgaactattgggacaaccatggtagcgccaagggcaagctggtcaactggactgtggaaaccggcgatgatctcccgaagaccgtgaacacgggcggaaccgttactctgccggacaccgtcaacgtcaaggaaggcgacgataccattgctaccaaggtgacatggaatgtggaaggcggtacggcagtcagcaagtcgaccaaggctgccggcagcacctacgcattcaatgtgccgggaacctacaccattacaggcactcttgccgagagcagcaacttcaacccgggccgcacattccgcagaaccatcgacgtttcctgctccaacccgatttccggaagttggaaggaagcccattggaagggcggcagcgcgtgccaggtcgccgcatccggcggtacctatgacttcaccgttacggacaacgccaatcgtggcgtctggacggatcgcaacgagggcagcgcggtgtaccagcctgatgctctggacgtgaacgaaacgttggaaaccacggtcaagccgctcgacttgggcggtaatggcgatccgcgtgccggcctggtggttcgtaacggtcttgctgacgctaacggcggcaagggatatgccacgttacttgccagcccaagcggcatttacatgcagtacgattccaatgccgatggctacatcgataaggaaacatcgcatgttggtgccggcttcggcgaccaagtgcaactcaagctggagcgcgccgcaaccgataccctgaaaggctactggcgtgcttccgcgaacgatgaatggcaggatgtcgctacggtaacgctgaccggtgcggacgcaaccgggctcgatgccggtgtcttcgccacgtcgaacagcaatgccggcgcattcaccgtggccttcaacggcactgcgttcggttcgcagactgctgctgtggagtccatcgcggctaaggaccctgaagccactatcgccaaggggcagatgctcgcgcttcgggacgtgacggttaccgccacgctcaccaatggcaaaacgcgtgtgctggagccaagcgaatacacgctggaaggcttcgacaccaccaaattgggcgagcaaaccgtgacggtgcgtcttgtcgctgattcttcagtaaccgccacgttcaccgtgactgtggaaagcaaccttgcccggttgttctgctcgtccgctgcggcctcgaagtatgagccggccagtagctgggcctccgcttctacggccgacctgacttgcgacaacaacctgagcaccaactggtcgaactggggcaccggcgacacctcgccgtggctcagctacaccttcgataaggcatatcagctgggcaagctcagcgttgcggtggataaggccaagggcgaggccgctccgaagagcttcactgtatcgtacctagctgaagacagcgccacgtggactgatgccacgctgccggcagtcactgtgaatggtgctgctggagccgtgacggaagccgatgtgagcgctctgcccgccaccaagggcattcgcctcaacttcacctacgccgatggcaatgactatgccaagatcgctgaagtacgcatcgccgaaggtgaagcgacaccagagccgcagccgtctagtaacgccaatcttgctgatctgactgtggatggcaagacggttgacggattctccgcggataccactaaatatgccggtgcgctggctggagatgctgcttcctacccgacggtggaggcgactgctgctgacgcaaaggctacggtgcaagtggagcaggcttcggccgagaacaacggcgtggccacggtgactgtaactgctgaggatggcacggcggaaacctacacagtgacattcggcgaactgcctcagttggctgagcttgctgtggaagtgaccaaggattcctatcaggtaggcgataagttcaacgctgccgatgtgaaggtatccgccatttacaaagtcggcgatactgaaacgctgcgcaagctgattgatccaactgatggtgatctgaagttcactggctttgattctgccaccgcaggcacgaggaccatcaccgtctcttatcgtggcgtgaacgcgacgttcgaagtcacggtcacggccacggaggtcactcccggccctggagagcagaagcccggcgataccaacaatcctggcaacactgctaagcccggtaacactgccacgaataagccggctgctaatggcgctgcgcccctttcgaatacgggtgctgccgtggctgccattgcggtcgtggttgtggtgctggcagctgcggctggtgccttgctcgtcatccgcaaacgccgcgcataaccatggcaactgctgagtagcgtggattgcgttgctattgagcaatctgcaatccacgccactcagcgagtgcgcccgagtgcgcccgagcttgcgcaatgcaggcgcaatacagtgcaaacagtacaaagcaacaataatggccggtctgagccagctgctccatgcgagggcagctggctcagaccggccattgtgtctgcaagtacatgcaattagagcatgaacatgtggaagccgttgagcgttactggttgttttgctttgttgttgcgctcagcagtgcgacggacgtccgcccgcagtgtagtgcagcgctccgtgaaccagcgccgatgtgaaatgcatgttgcacatgcccgcttcttctgcttcgtgcgtgcagccggcgatgctgcataggttcataccccgaatcatggtcataccccctctttgggatggcatccgtgccgccatctgctttcagagcatagcggacaattgttgcattgcctaggcggtacaacgctttctgtggcctgtatcacatccttgccggcgttctgcggcgtggttgggcgtgtacatgtgctcttgtgcggttttgttgtgtgtgatttgggtatacggatagagtttcttctctgcagtggcaagggcctctcggccggcgagccggctgatttctcccatgcgttgctcaatgatttccgttttgcgagtctgaacggcaaaatagctctggagaagtgccacttcttctttctttggatcaccgttttgagcaatgagatagcaggcgtatcgggtgagcttgacgtccgcgatggagcgggtggcaccgctgccgagagtcacgtctcgcgtagtgtcacggaaatgggattcaacggatacgccggaattgtcgcaagcttgcttggctcgtgtaatagctttgctgaagttttcccatctgtcgtaccccatataggtcattagctcgcgtgcataccaatactcaactttggagtcctcggtggtgtgtgcgatagtgctgagttcgctggttttgcgtgtgatttcgtcgcggttcatgggtgtgtccttatgtttttcatgaccattttcgtgactccacgaaaatggtcaaagccaataattgcaatggttttgaggtatgggcgcgctccgcccaactggtctgtcttcatccgccttttcgaccagatacctcatggagcacaatgccaacgtcgctaccgttggcccagcaaatattcttagacgacgccccgaagtgaatatctatgcggctttcagaatatcaaagagcgtggagtgtgtgcattatgcgttccaaaaatagtttctagtaatgaattgtttacggtgtgagatattcttggggtgtttgcggcgctctgccgtgtggcgaatgggaatggatggtgctcttatgggatttgagcaggaggcagttagtgaactgtatgccagcgtgtggggcaatcgttcgacaatgcagagggaattcactcgtggagcccatggtgagcagttcgtgctccgggagctgtccatgaaggggacgcaaacgccatcgcaattggcatcggcgctgcaggccagttccggccgcatctccactgtgctgtcgtctctggagaagaaaggctgggtcacgcgtgacattgattccaaggatcggcgcattattcgcgtgaatctcactgattccgggcgcgagcagtctcatcggatgatagaggaaatgcgttccgcaatttgctggattttctcgcaaatgggggagcggcgcacgcgcgaattcgttgacctggtgtctgagttcaccacatatatgtcgatttgccatccggggcggcctcggccgacggctgaacaagtgcgtgaggcattcgtggagcgggacaagcgcgtggctgaacacatggcagctaagcgcgcggaggctgagcgagactagcttcctcccgctggcgggtctctccctccgtcactgctgcgcggtgacacctccctcgtcagagggaggtaaaggtaattgaggacgctcacagcgaacatacagaagtgcgtataatatctcacagtgtaagtaatcaaacaatggaaactattaagacatcgtgaaccgataatcaccgataacccagccaacttaagaaccaatcgccaataaccaataaccaacccaaccaacacaaggggaaaccaatgtttcgcatcatgaaatacctctccaaagcggagatcggtcagatgctcatcgccctggtgaccatcgtcgggcaggtctacttcgacctgaaactgcccgactatatgtcagacatcaccacgctggtcgagacgccgggcagcgacatgaaggacatctggatcgcgggcggcaagatgctgctcatctcgctcggatccgtggcgtgtgccatcatcaccggctacatcgctgcgcgcgtggccgcctcgttcacccagcgtctgcgctcgctcgaattccgcaaggtcgagtccttcggcccggccgagatgagcaagttctccaccgccagcctcatcacccgttccaccaacgacgtcacgcaggtgcagatgttcatcaccatgggcctgcagctcatcgtcaagtcgccgatcatggccgtatgggccgtgtgcaagatcgccggcgaaggcttcgaatggacgctcgccaccggcatcgccgtggcggtcctgctggtgtccatcaccgtcatgatggctatggtcatgccgaagttcaaggtcatgcagaccctgaccgacaacatcaacctcgtggcccgcgagaacctcaccggcctgcgcgtggtgcgcgcctacaatgccgaggactaccaggaagccaaattcaccaaggccaacaaggacctcaccgagacccagctgttcaccaaccgcgtcatggcgttcatgatgccgttgatgaacaccgtcctgaacggcctgatgctcgccgtctactggatcggcgcttacctcatcgacgccgccgggctcaaggacaagctcaccgtgttctccaacatggtcgtgttctccaactactccgtgcaggtcatcatgagcttcctgctcatgagcatggtgttcgtgctctggccgcgcgccgacgtgtccgcgcagcgcatcatggaggtgctcgacactgagccgatcgtcgagaacggcaccaaaaccgccgccgacgtggccaaaaccggccagaggggcaccgtggaattccgcaacgtcagcttcacctacccggattcgcgcgaggcgatgctggaaggcatcaacttcaccgccgagcagggccagacggtggcgttcatcggctccaccggctccggcaagtcgtctcttatcaatctcgtgccgcgcttctatgacaccagccaaggccaggtgttggtcgacggcgtggacgtgcgcgactacgacctgaaggccctgcgcgacaagatcggctacgtgccgcagcagtccgtgctgttcaggggcaccgtggcctccaacgtgagctacggcgatcagccgggcgacccggcggaggtcgagatggccgatacctccaccccggccgggcgcaagcgcgaggccgcgttgatcgccgctggcgaggccgcggaaggtgccgatataccggccgagcagctgaatcgcgtcagggccgccgccgacgtggcgcaggccagcgagttcgtggcgcgcatggacggcgggtattccgccgcgatcgcccaaggcggatcgaacgtgtccggcggccagaagcagcgcctgtcgattgcgcgcgcggtgtaccgtcacccggaaatcctgattttcgacgactcgttctccgcgctcgacttcaagaccgaccgcgaagtgcgcgacgcgctcgcccgcgaggccaaggattccaccaagctcatcgtggcccagcgcatcggcaccatcatgaacgccgaccgcatcgtcgtgctcgacgacggcaaggtcgtgggtcagggcacgcacaaggaactgctcgacaactgcgacgtataccgccagatcgccgaatcccagctcagccagtcggagcttacggcgtagggggggcggcagcggtagctccccatgtcaggggctgagccgtaaagggaacagcccactgggctgttcccaggcgaagacgagctgataagcgagcgaataaaacagcacagctgactgaggggtagtcgcgtacggcttctctccctccggcgcttcgcgccacctccttcatcagagggaggtcaatacggacttttaaggagtaaaacaaatgccaagaggaccaatgggcggcaggcgtgccgtcgaagagccccatgatttcggcaaagtcatgggcaaactcgtgaactactgccgcaactatcttcccgtcatcatcatcgcgctcatcctgggcgcggccggcaccgtctgccagatcgtcggcccggacaagctcaaggacatgaccaacgagatcgtcaaaggtctgcccgccatcgttaacggcagaccggtgatgaactcggtagatttcggcacggtgggccacatcgcctggactttggtggccctgtacgtgggctacgccgtgctcggctacgtgcaaagctggatgatggccaacgtcacccagcgcaccgcccagcgactgcgcgagtccatctcggtcaaaatcaacaaactgccgctcaaatacttcgacaaggttagctacggcgacgtgctgtcgcgcataaccaacgatgtggacgccatcggccagacgctgggccagtcgctcggctcgctgattacctcggtgacgctgttcgtgggcgcgctggtgatgatgttctacaacaacgtgatcatgaccctgtgcgccatcggtgccagcctcatcggcctgatcatcatgatggccatcatgaagtcctcccagaagtacttcgcccggcagcagatggcgctgggtgacgtcaacggccacgtggaggagatgtacgccggtcacctcatcgtcaaggcatacaacggcgaggccgattcgattcgtcgcttcgagaagtacaactcggacctctacgagtccggctggaagtcgcagttcctctccggcctgatgatgccgctcatgaatttcgtgggcaacttcggctacgtggtggtgtgcgtggtgggcgcggcgctcgcgctcgacgggcagatcgagttcggcgtgatcgtggcgttcatgatgtatgtccgcctgttcactcagccgctttcgcagtttgcgcaggccttccagaacctgcagcgctgcgcggccgccgccgagcgcgtgttcggtttccttgaagagccggagatggaggacgaatccgacaagtccgctttgcttgggaccaacggccacgaagtgaagggcgacgtggaattcagccacgtgcagttcggctacgagccgggcaagccgattatcaacgacttctccgcttcagtctcggccggtcagaaggtcgccatcgtcggcccgaccggtgccggcaagaccaccatggtcaacctgctgatgcgcttctacgagatttccggcggttcgatttcgattgacggcgtggacaccaagtccgtgccgcgctggaacgtgcacgaccagttctccatggtgctgcaggatacgtgggtgttccgtggcactgtgcgcgagaacatcgcctactccaagcctggcgtgaccaacaagcaaatcgaggatgcgtgcaaggccgtgggcctcgaccacttcatccgctcgctgccggacggctatgacaccgtgctcgatgacaagtcgtcgctctcccagggccagaagcagctgctgaccatcgcccgcgcgatggtgcaggacgcgccgattctgattctcgacgaggccacctcctcggtcgatacccgtactgaagagctgattcagaaggccatggatgcgctgaccgtgggccgtacgagctttgtgatcgcgcatcgcctctccacgattcgcgacgccgacatgatcctcgtcatgaaccacggcgacgtgatcgagcgcggcacgcacgacgaactgctggcggcgggcggtttttacgccgacctctacaacagccagttcgcgctcgctgactgacggattgtttcctgcgttagcggattagcggattagctatactcggctcccctctccgaggggagctgtcagcgtagctgactgaggggagcaacccatcggtccacccgagggaatgctccactggatgtgatactgatgatttcgtacattagtgtgtgaaaaagccgccgggaaaattgggggattgggcggcggtgcggttggcgttgagaatggcgcattcgaaggggaagtgagcgcgcagctgggtggccggggtggtgaacagggcggtggcgaggccgtcggccagtgtgacagggacgtgtgccgcaacggtgttcgacgaatcgtcggtatcgcggtttgccgttgtcgaggcattgctgccatgcgtcgatgtcttcgtggttatggcgctcgatggcggcgtgacggccacccatgtggcggctacatcgtcaaccggtagtccgtcgatggcgttgagcagatggtgaagttggtgacctgcggcgtcagaccagtggcggcggctgggggagctcgcgcagaatgcgccgtggctgatttcgaccgtacctacggcgttggccggatcggcaggatcttcaagggcgatggtgattggttcgtccgtgtgcactagcaaatcacccccggcgtcgatgacgtattgaatgggttgagggtgacccgcgccatcacccaacatccccgcaagcaaatccaccaaataccccttaccgcacgcgccgaaatcgagcgcgaccggtccgcgcgtcaccagtgttgtgccatgccgctcaacgtcggctgaccaaatggctcgtccgtggatcgcgcctgcatgttcagcggcatctggcgcaggcgtaaacgaatacgactcgtcatagccaagccgaatcaaatcctcgcccacgcacgggtcggtcgccccatcggttgccgcaaacaggcggtcgtacaggccaaacagacccgatgcccagtcgggaaaatcgaacgtgccgccatgtgcggccgtgcgcatccggccgacgatggaatcatcgcggaatcgagataatacaacctcatattcatggatgaacgagccaatacgatcgcgtatctcatcgtccaatacgctctcggtgtgcaccagtaatccggtccccaacgcatcaggaaaagcgtatacgtatggcagttgctcggtcagacttgtcatgcccactatcgtagaacgcatggtgtgccggtgtatactggattttgacactgtgtcaatgttgattcggaggttgtgagaatgggcaatgcgactacagcaagtgtaacgggtgtgcaagttgcaccggcgaagtcagccatcagagatctccccatcgccaaagtgtgggcgtttgcggtcggccagttcgggtgggcgctgctttccggcatcatctccaactggctcgtgtatttctaccaacctgaccaggagaccatctcccaaggtcagaccgtattcgtgccgcagggcctggtcgttctcggcatcgtgaccgtggtgggcggcatcaccgccttcgcccgattcttcgacgcgttcgtggacccggccgtggcgtctctctccgaccgttgcgacgccaaatccggccgccgtatgccgttcctgaaattcgccgccctgccgctcgcggtggtcaccgtgctcgtgttctggagcccgatcaacggcaccagctgggtgaacgcggcgttcctgttcgtcaccgtgatcggctactacatcgccctcacgttctactgcacgccgtacaacgcgctcatcgccgaactcggccacgactccaagcagcaactcaccatctccaccgccatctccttcacttgggtggccggcacggccatcgcgtacgtggcgccggtgatttggggcgcgttcgtgccgatgatgggccgcatcaccgccatccgcgtgaccttcaccatcatggccgccgtggcgttcgtgtgcatgctggtgccgccgctggccatccgcgagaaggactacgtcaactcccatcccacctccgaatcgaccatcgaatccctgaagcagacgttcggcgacggcgaattccgcaagttcgtatgctccgacgtggtctactgggtggccatcaccaccttccagaccggtctgccgttcttcgtgaccagcctgctcaagctgccggaaaccaccacgaccatctacttcgtgctcatgaccggcgtctctgtgctgttctatctgccggtcaatattctggccaataaggtcggcaagaagaggctgctgctggttgccttcgtgatcttcacctgtgcgttcgcatttgccggcgcccttggttcggccgtgctcggcttcattccggcgatggcccagggtttggtgctctcggtggtcggcgcgattccgatggccgcgttcggcatcctgccgcaggccatcgtggcgaatatcgccgacgccagttccaagaccaccggccaggaccgtcagggcatgttctacgcggcccgcacctttgcgatgaagatgggccagtccgtggccatgctgctgttcaccggcgtctccaccatcggcatggcgtccggcgcgggctaccgcatcgccgccgtgtgcgcggccgtgctgtgcggtctgggcggcatcgtgttcgcgttctacaacgaaaagaaggtgctgggcgtgctggagacgtgatgacgttgccgggtgccgccgcggtatccatgcggagcggtgtgggtgacttgccccgtctgcgacaccgaaacgttaccgtgtcgacacgcgtgcgacacttcggcgtcaaattgcgtttgaccgtactccgtactatattgttgcgagttgctttgcggagcaaagtaacatccaaggggctgtagctcagttggtagagcgcttcgttcgcatcgaagaggtcgcggtttcgactaccgtcagctccacgagaccctctgcattcattccaccgtagagggtcttttcattttgttttcgttgaaattctgccatctcgcgtttcaaggggctgatttggggtttgccggaggtctacttgcgtttcgaggggctgatggtcaagtagatacgccgccaaaatggcggaatagcgttgcgtcaaagccgtttgtactggtgcttcaccggatgaggagccccttgaaacggaagtagacctccggaacatgtgaaatcagcccctgcaaagggagaatgcctcgatttcgccatggattgtcgtggattgctctgtggcatgggcaatactgggagtatgacaagcgcagatgagttgaatgagcagtatgacgctgacggtagcgtgacgcaagtgcctgaacgcaatgatgaagttcatgccggcgaatccgccgtcgcccaatcccgcgaatcggccgtgaccatccccgccggcaccgtggtgctcgccgccaccccgatcggcaatgtcggcgacgcttcagcccgtctggtggccctcttggaacgggccgatatcgtggccgccgaagacacgcgccgcctctacgatctcgcccgtcgcctcggcgtctatgtgaacggtcgcgtcatcgcctatcacgaccacaacgagcgcgacaaggccgacggcctgctcgaccaggtcgaaaccggcgccaccgtgctcgtcgtgtccgatgccggcatgcccaccatcaacgaccccggcttggccatcgtgcgccgtgccatcgaacgcggtctgcccgtcacctgcgcgcccggcccctccgctgtgctcgacgcgctcgccctctccggcctgcccaccgaccgcttctgctacgaaggcttcctaccgcgaaagcattccgagcgcgtgcagtatctgcgcacgctgttgcccgaacgccgcaccatcgtgttctacgagacgcctcatcgcattgccgattcgatggacgatctgctggacgcgttcggcccgaatcgcccgatggccctgtgccgcgaactcaccaaggattatgagcagattcgtcgcggcccgattgacgagattcaccaaagtgtgattgatgatccgccccgtggcgagatagtgctggtcatcggcggcgcgtccaacgaggaggccgaagcggccgcgcccagcacgttgagcgtggatgacatggccgtgctctccatcgaccgtgctttggaggacggcctgcgtatcaaggacgccatcgcgcaagtggtgcaggagcatccactggctgacggatcgttggccaatcgcaagcaggtgtatgcggctgtgctgaagatcaagggatagcgcagcagccggcgattatctccccgttacgtttccatcgactcgaacaatatttccaacgcctgccggaccccgggcccaccacgctgcgagaccaattccagcaaaggtgcgtcggctttgggattggcaaccagccatttacgcagttcgggcacgtgatatgcgatgtgccagagcacggcaacatccgtatcgggcgaacatgccaccgcgggcgtaagtctgatgggcggttcaggcggcgcggtcatatccgagattgcgcgcgatgcggattcggatgagtgtgccgccgccgcgtggcgaggcaaccgttgcgcctgccgcaaatgccgtaaacggtgagcggcatggcggcctctgcgatggcctctgacaatgaaccccctcgtcatgcgcattgctccaaagccggttcgtccatctcctgctgcaccgattcaaaaaacatgcgtgcgcgtccggcgtacttgtgatgccgatgctccttgacgatttgcagacagtcgtttggccgaaactggtacgcggacatcagctggcacaccagtgcgttgacggtggaaggatcggggatgtcttcaggactcatcaccaggtcgcaagccgtacgggctggcgtggtgacaggcagcccgccgagcttgatgatttgctccggcaacgtcaatcttttgaatacgcggatacggcggctgacggatgccgagcggaagtgcgatgtggaaatcacgtctatggtactcggaaagtcggggcctcccagccatacccaagcggcggtcatcgaacacaccacagtgccaaacggggcgacctccgcgacgattttcgcgcgaccatacagtgtgcccgaatgctcgatccagtagccggcggaatcgtcgagcttatgtaacgtgccgaaggcggccagacggttaaggctgagcggtcccggcagatccttggtaaacagtatcggcggcaccgcaggctgcgcggttgccggcgaggcgactgttgtgatgtccgtcatcggacctgctgtgatatccatgaccgaacaatatgcagaaatgcggcttgcgcgccaccggataggcgaaaacggtggataagtgcataactttactaggtgcgcaaatgatgtggataactcggtggatattggcaggcggaagtgtgtgcggatgtgcgtgggcgtgcgtacggatgggtgcgcggatacgtgtgcgaatgcgtatgtggataagcgcgcaagaggtgtacagataagtatgtggggaagttgcgggtggataggtgagtgggatgaggatggcggcgcggcagctatccgggcgtgtccccgccgcgccggataatcaagccttatgagtcatgttttggtgaatgttgcttggccgtatgcaaacggcccccgtcatatcggccacgtcgcgggatttggtgtgccctccgacgtctacgcgcgctacgagcgcatgaagggcaatgatgtgctcatggtgtccggcaccgacgagcacggcaccccgattctcgtcgaggcggagaaggaaggtctcactgcccaggaactggccaaccgttacaaccgcgtgatcgccaaggatctgtgcgacctcggcctgagctacgacctgttcacccgcaccaccaccggtaaccacgagcacgtggtgcaggagatgttcaagcagtgcttggagaacggctacatctacaagggcacccagcaggtggcgattagcccgtccaccggccgtaccctgcccgaccgctacatcgagggcgagtgcccgatttgccacgccgaaggtgcgcgtggcgaccagtgcgacgcctgcggcaacgagctcgacccggacgagctcatcaaccccgtctccaagattaacggcgaaaccccgcgcttcgagcagaccgagcactacttcctcgacctgccggcgctcgccgaagccaacaaggcatggctggagacccgcaagggctggcgcaccaacgtcatcaacttctcgctgggcctgttcaaggaggtcaagccgcgcgccatcacccgtgacatcgactggggtatcccggtgccggtgaagggctggattgacaacccgaacaagaagctgtacgtgtggttcgacgccgtgatcggctacctgtcggcctccatcgaatgggcccgccgccagggcgacccggagaagtggcgtgaatggtggaatgatccggcgtgcccggcctactacttcatgggcaaggacaacatcaccttccactcccagatctggccgtccgaaatgctggcgtacaacggcaagggctccaagggcggcgaaaccggcccgatgggtccgctcaacctgcctgagcaggtggtggccagcgagttcatgaccatggaaggcaagaagttcagctcctcccgcggcatcgtgatctacgtcaaggacatcctcgcccgctaccccgtggatgccgtgcgctactacatttccgtggccggccccgaatcctcggattccgacttcacgtgggccgagttcgtgcgccacaacaacgaggagctcgcctcctcgtggggcaacctggtgaaccgcgtggccaacctcatcaacaagaacttcggcgagattccgccgctggacgaggattcgatgaccaacgaagaccgtggccttctggaagaggcttccgccgcgttcgacgtggtcggctcctccatcgaaacccaccaccagaagcacgccctgtccgaggcgatgcgtgtggtcggcgacatcaacaagtacatttccgccaccgaaccgtggaagattaaggacgaccaggctcgtctcggcaccgtgctgcacgtggccgctcaggccgtgtctgacgcgaaccacctgctcgcgccgttcctgccgcactccgcacagaaggtgtgggaggcgctcggcggcaccggcaccttctcgccgctgcctgagctcaaggaagtcgaggatctcgacaagcccggcttcacgtacccgatcatcaccggcgattacgagctcggtgtgaacgtgcacccgtggaagagcgaggcaatcgaggtcggcgccatggtgcctaagcccgcaccgatcttcgccaagattccgaccgaggccgtggaagaggagctggctcgcttcgatgaagcgttggctgctcgccgtgccgccgaagccgaacgtctggccgccgagaaggccaagctcgccgccgagtgattcggcattgctagctcgtagctgacgggccacctcgcacatgaagtgttgcggggtggcccgttgccgtatgtgcggcctagccccgacaatgcgaggccggttgtcgggcggcgttacaaacccgtcacagtttgccaagacttttctcagacaagcacatcgaatccccaagaaagagacggttatatagaagatgtcaacggaatgaagttcataccggtggcgaggttcttccgaaccccataactgaacccttcttctctcttctctctcacccggcggcccctccgccgggtttcttcgttttgggccgcatcatgcaacgcaagttacgctgctgtccagctacatccacgccgctcgaagccgtgatccgccacaccaagcacggggcgcggtgattcggagcattgcaggattccctccatgcttccggtttggggggtgctgcttgattcctctacttccagcgaaacgttgctatcgcggtatggtcgcatgcctgttaagcattgaagcatcttatctatgcgcagtcggtgtcccggtggtgacggcaaccgattgacgtgcgaaccgggccagatttcgttgtcccggttcgtgattttggcctcttttggggaaccgggacagaccatcccgtgagcgctcaatgtatgcaaatccagaagcccggaattccgccgatgtgtgatggcggatattgtgcggtagggccgaattggcgatttttcgagggtgtttctgtcccggttgctcaaaaagaggcgaaatggagaaccgggacaacgaaatctggcccggtacacacataaatcgattgacgtcgttaccaggacatcggacaccgtgacgtatatcgcgaaccgcataatatggcagtacgcaacgcagatgatgtgcggattcgccggacgtaacatggcgtgtgacacacaacagtgccatgcggtcggggccacgcgaccaaatggggtgcgatgaatggcatatgcgttgcagcaagcgcgcgcaatcgtatcgatgtcagctcagtgcgccccggtggatttccgtcgtttccgccgggcaagttcattgagcggcgtcgctgtcaaggtgaaatcgaatatggagcctcgcaacgccagctgtcgcccggctcggtaggcgagttcggcttgagacggttcatcagccatattcgcggcggtggcgatgaggacgatccaatgatgatgccgtaacagttcgcgcttgtcgttgtctcgccgccactgggccttgtctgtgcgatgatgatcgccgtcatattcgatggcgacgcggaattcgggccaagcgagatcgagtgttatcggcgcaccattgctgaacgtcgcgccgggcactgtgtaatttgtcacggctcgtggaagcccgtattgcgtggttgtgatacgggtctctgattccatcggagaatccacgcgcggtgcaataaattcaagtgcgatcatgcatgtggctttcgcgttgaatttcggaagttcgctgacctgccgcacaaagtcctgataaatttcgtcggcggtgcggccgcccgataggctcggcttgcgcgctattgccgtaagggttgcgtcgccaagtatgaccaatgatcccaatgacatgtgagcggcgagctgcgcccaagtatgtaccagatccagcgcgtgcacatgcttgttgatacgtgcattgtgcgcggtgcttagcggtttccagatgtgcggtgttgttggcggaacgacggcgcgtatccgggtgcgatgcgagtcggagacggtatggagctcggtggcattgagatcgcaatccttgggaagtggcacggattgcagtatcagcgatgtggtcatgccgaagagcacaggctttccgagctgttgcgcggcgtccgtgcatcgtttaagaatttcccgcttacgttgggtgagggtttcgctcatagcgggcgcagtgggggttgccatacgcggtggtgagtatggctcgggcttgacggcgtgcgtggacgcagcactcggtgccgcggcattgttggtccagccgggtggttcatcgtcgaatacgccgggtggcggggtgggaaatccgctgttcataacgccaccgtagcgtagcggtcgcttgttcgccatgaaaaacggggtatgtggttctagcttgctgaggatgtggataactctgtggataactaaagtgctcctatgttttgctcactctgtgagaagtcggcaaaacataggagcacttcagccgcggccaatgggcggaatatgtcagcggcagcgacgggtgaggggctgccagggatcgagctcgactggttcggtggtgagcagggcgcgggtggcgtcgtcgaggtattccttgcggatgatgagctcggtaacgtagcggtcgaaccaggcgtcggacatgacgtagtagccgtcctcgccggcgtccttgccccagctgttctccaccttccagcggttcggcttgccgtcctcgccgaggttcacgccggtgaaggtcatggcgtggttgctcgggctgtcgccgtattcgaggccgtgggccttgtcgccggtgaattcggtgccgaacagctggtcgacgcgcaccacggactggtcgaagaaaccgtccttgcgcagggcgaactgcgtgcagtcgcaggcgaaccagatcgggtggccggcggtgagctggtcaagcgcggccttcttgaacacgtccagcggcacgttgacgaactccatatcgccagcctcggccacgttcgcgctgaagcggatgcggtagcgctggttgaacggacgattcttgagcggggcgttggccagcgtcacgaaatcgttgacgtccaccggcacgtacttcttgtagaactcaagcggggtgatgccgatctcgcgaatctgcgggcgctcgtccttgccggttttcggcttgtcggacttgtccttatcgcacttgcaggccttggcgtcggatttgccctcgcacttgcaggattcgccgcacttgcaggattcggccttgccgtctgcgtcggcctcggccttgcacttgcaagcttcgcccttcttatcctcatcatcatccttggggcgcgcgaagaagtcgaacttctccggcggttcgccgagcgccacggcgcagatgcggtacacggtgcccatgtactcgtccttcagcgcacgcagctcgtcctcagacgcccccgcaaccgaacggcggcgcagctcggccgcgaactcgcgcagcttggagttgaggtactgcttgaaatcgtcggaattacgggagttctcagactccgggtaggcgctcttgggcactaggccgtacttgttcaccagtgcggcgaacatctgccaccagccaccatcgtctgcaggcgactcattgatggcctcgaacagacgcgaatcggtcgcctcgtcgagcgtgcgcagcacgttctccagataagtgttcgacttctccatcgcgtcccagaagaacaggtaggtctcggagaactcgaaatcctcaagattccagcgatgcatgagttcgtaacgcagcgtgttcagggaggcgaacatccagcaacggccggaacgctcctgattggtgatcgaaccctgcttgagttcgatggagaagtcgcgtggcagcgcacgcacgccgcgatagtcggtggccgccttgagcacgccggccgagaccgccgcgtccgccgcgatcaggttggcgcggtccttgttgaagtcttcggtgtacgtacgcagaagttcgggtttgatggcccgtgcgctggcgtttgctgtcatgatgattgatcttccattcatgtaggcgacgtttgtggtccgtcggtagtataagtcgccgtgtattcgtcggacgattcaccgggcgaaatcgtacgggcggatatgcgccggcgattccaccccgccaacgatttgtccaccttgctgctcgcgcgggcgcacgtatcatatgtgccgatacatattgttgacgaatgtcgcatagtccaaaggagtacgtcatgacttcgctgcatagcaagccgctggccctgaaaaacgtcaccgtcaccgattcattctggcgcaccgagcaggaactcgtgcgcacggctgtgattccctatcagtggaacgccctgaacgataacgtccccggcgcggcccccagctattgcatgcacaacttcaaggccgctgccgcgcaaaacaagcgcaaggatacccagggcaacgcgttcgtgccgccgaagtacacgttccgcggatttgaggcgctccccgaagacccggccaatcccgacccagacaagttctacggcttcgtgttccaagacaccgacttctccaagtgggtggaggcagtcggctattccctcgcccatcacccggaccccgcactggaacagaccgccgaccaagctgtcgacatcgtgtgtgccgcccagctcgacaacggctatctggacgcctactacatcctgaacggcatggatcgcgcgttcaccaatctgcgtgaccatcacgaactgtactgcctcggccacctcgttgaaggtgcggtggcctactaccagggcaccggcaaagacaagttgctcaaggccgcctgccgtttcgccgattacgtagacgagcgcttcggtcgcaagccgggccagctgcgtggttaccccggtcacgagattgccgagatggctttggtgaggctgtacgaggtcaccggcgaacagcggtaccttgatctggccgaatatttcgtgaccgagcgcggccggcagccgtacatcttcgatattcaggcagacgagaacgcaaagcgcgacgccgacgccaactacaaacccaacacggaccccaaccggtacgcctatcaccaggcgaacaagccggtcaccgaacaagacgaagccgtaggccatgccgtgcgcgccggctacttctactccggtctggcggacgtggcccgactggccgacgaccaggacctcgccgatgcggccgagcggctctggcgcaatatcgtcgataagaaactgtacgttaccggcggcatcggcggcacggtggacggcgaggcattctcctacaactacgacctgcccaacgactccgcctactccgagacctgcgccgcgatttcgctggcgttcttcgcccgtcgcatgctcgagctcgcgccaaaggccgagtacgcggacgttatggagtcggcgctgtacaacaccacgctggccggcatggcgctggacggcaagagcttcttctacgtgaacccgctggaagtcaatccgtatgcctgccataaagacagccgcctgcgccacgtcaagccggtgcgtcagaagtggttcggctgcgcatgctgcccgccgaacatcgcccgcatcgttgagtcggtgcaggaatatgcctacacggttgccgaggatggcggtacgctgttcacgcacttgtatatgggcggcgtggccaaagctgagttgaatggtacggctgtggagctggatgttacggcgaacctgccgtggcagggcgatggcaaggctgtcgtgcgcttgggcggtgacgctgctggcacctcggctcaggctcctgctcgctttacgctggccttccgtctgcccggttgggtgggcgatgagtccgctgctgccgccgcgattacggccacgggcgagtctgagtctggggccgatagttcccgcgtgacccgcgaaattcgcgacggctacctgtatctgaccggtgagtggcgcgacggcgacaccgtgacgttcgacttcccgatgccggtgcgtatgctggccgccaacccgctggtgcgcgaggacgccggcaaggtggcgttcgtgcgcggcccgatcaccttctgcgccgaggaaaaagacaacggcgccaacctgcacctgctgcacgcggatgtggaggcactgctggccgacccgagcgcggccaaggtcgaggagttcgacttccacgccggcgccaagggcatcgacgacaagggccagggcgaggtggaagacgtgacccgccgcatggtgaagcttgaggtgccggcttggcgcgagccgttgccggctgctgtggccgccgcgggtgagggcgcggccgaggttccggcgttcgcgccgctctacgccgtgtacgcgccggtcaagcgcgagcccgccaccgccacgctcatcccgtacttcgcctgggccaaccgcggcgaaaacgaaatgaccgtctggctgcgcggctgatatttgctctcggctactctggtagccatgggcatcacgacatgtcggctcgaagggccggtggacttttactcggtcgggcagtttgtgtccggaccgggctggcgccatctgcggcgcaccatcgacaccttcgagctgatgttcgtgcgtcggggcgtcctgccgatgcgggtgggggagcagaccctgcatatcgaggccggccaaatcgcactcttgccgccgaatgtggagcatgcgggcgccgacatcatcacgtctgacgtggacttctactggatgcatttcaaattgccggatgcgcgcatgctccccgatgacgcgggtctgccgcaggacgaccattgcctgttgctgcccgatgaacgcaccctgcccgaccccgaccggctggcggtgatgtgtgggcagctcatcgacatctatgcgcgattcggcccgtattccaacgcttactgcgattacttcgccaccggcctgctgctggaggtcagcgcgcaggagcggctgaaggcggactttgccgcccatcgtacgcttgccggctaccggggcgacggcaagcccatcaccagtgccgaccgcgtccggcagcaacaggaatgggccatgcatgtcgattcggccggtgccgctggcgattcgtccggcctggcgccgatgctggccatccgctcgtggattatggccaatgccttcgacgacatcaccgtggccaaagtggccgcgcgcttccactattcacccagctatctgaccgcgatgtaccggcgcgtgttcggcgtgggtgtggccgagcagatcatcgaatatcgcatcgaccgtgcgcgcgaactgctgagttctaccgcttccagcgtggcggatattgcgcgagaagtgggctacgccgatcccaagtacttcatgcgcgtcttcaagcgccgcactggcctgacccccggccaataccgcgacgctttccccgcccgcctctacaacaccgtgtgattagggaaggtcatggtcctaaccctaggaaaagtgcgcatgggcgccactaccacgtgggagcgctgggaacggtttgacgcatgccgaaacctcgcacgtcacgctgcacggcacttgggcagtgggcgcggcagtcgggaatcgccgccctatttcggcgtttcagcgttacctgtttgccgaaccgacagtggactcgcgcggaaccagtgtgtatccaatggtggcgcgcgtggccggcatgccagcggattcgtcggacctgccgtcgccctggtcgcgctgctccacgcggcgggtgatcatatcaagcgcgaattgggcgagctgatcgagatccacttggacggtgctcagcgtcggtgtggtgtacgagccggccgtggcgccgtcgaagccgatgactctcacatcgtcgggcacgcggatgccgtagtcggcaaggcctcggattactccgaatgcggcatagtcgttaatgcagaagatgccatcgatggccggggtgcttcccgttgcccgcgtggtgcccggggaacgggactcagcagtgtcatcagccgattgcgcacgagcctcgagcatcgcctcggcgatggcatgaccggcttcgatgccgctgtcgctaccgtaaccaatgaagttcgtcgattcgtcatacggcagcccggcgtcaagcagtgcgccgctggccccgcgtagacgcaaaccgctggaactttccacgtgcgccagttcggttcgtggcgaatacccgtcgccgacaatggcgatgcggtggcatccgcattcgatgagatgctgcactgccgcccgcgcaccgtcctcgttcgggaaattcactgtatcgaacgtgggcgtttcctcgcaggcgtcaatcagaaccagcggtcggccgtggttgatcgcggaaagcggcacaccggcattcaggcccgaagcgtggataatctcgccgtcgaacaactgcccggagaacgggttgttggccagcgcgtgtttggcggcatccggagagtaccgggtttgctccacgaacggcgtcagcccgcgcgcggtggtttcggtgacgagcgattcgacgagtttggagtagaacggcgaatcgaattcgttgacgatgatgtggatgatgttgctgcggccggacttcagcatgctggccgtcagattgatgcggtaatcgagcttttcggccactgccagcactttggcgcgagtggaatccttaacacccggcttgccgtgcagcgcattcgaggcggtcatgggggagaccccggcggctttcgctacgtcgcgcaatgttggtttgccgctcggcataacgtcacctcatgtttcgcctgtgatgggcattggacaatgcccgtaatgcttccaatggttgtaacggtattcacaacatcgtgttttggcaaatggtggctgtgcgccggaatcgctgaaaatgctgcgcttaggcgatgacgcgccgagcgtaacatgcgcttgcttgatatcgttccggtggaagaatatgtaacggtacatacgtcggtgtgccaagaggccatgaagttcgtcgtacgttgggatgggactctccgggggagtggcgtcactcttcacctatccgtacgtgcgcgatgccgattggtttgcggctggcgtaccgccgtatggcaacttatacgaatatcaacgaaagcaggatacgatgacggatcttccgcagagccttcctcaggcatggcgtccgccgatgggctggaacagctgggattcgtacggcacgactctcaccgaagacgagctgctggccaacgcgcggttcatggctgaacacctgaaaaacgccggctgggatacgttggtcatcgacatcgactggtacgacccgaccgcccgcgcacatggttacaacgacaacgcgccgctgattctcgacgaatacggccgtcagctgcctgacccggtgcgtttcccgagtgctgccggcggcaagggattcggcccgctcgccgccgccgtccacgaactgggcttgaagcttggcatgcacatgatgcgcggcatcccgcgtatcgctgtggacaagaacctgcccgtatacggcaccaactacaccgccaaggacgtggccgacctcgaccacgtgtgcaagtggaatccggacaactacggcctgaaccaatcccacccgggcgcgcaggcctggtatgacgcgcagctcgacctgttcgcctcctggggcctcgacttcctcaaggtcgacgacatgcagaccccgttccactccgacgaaatcgccgcctatcatcgcgccatcgccaaagccgaagccaaatacggccgttcgattgacctgtctctctcgcccggcggctgggtggcgacgagctacgtcgacttcctgcgcgagaacgcccaaatgtggcgtatttccgacgatctgtgggaccgttgggaagacatctaccagcagttcgcccgcctggcccgctgggcgccgttccagaccaccggccactgggccgacgccgacatggtgccgttcgggcacataggcctgcgcgccgaacgcggcgacgaccgccaatcccgccttacgctggacgagcagaagacactgctggccctatggtgcatggggcgtagcccgcttatggtcggcggcgatctgcccaccagcaacagcgacgccatcgcgctgctgcagaatcccgcgttgcgtgaggtgcttgccggctccaccaataaccgcgagaccgtgcgcgaacggatttttggcaaatggtgggatgagagcacctaccgtggcgagttcatcgtctggtccgccgacgcagccgattgggctgatggcacacgttccgcgcatcacggcggccattacgccgcgctgttctggaccggcagcgacacatacgagatcggccgcaacatccagctccaatccattgtggggcttgacgcccgtaatgacgattggacgctatccgatctgtatgccgacgcgccgggcgagtccgccgacgtgcgtcttgaaggcgtgggtgccgaccgcgtcatcaccggcacgattccgccgcacggcgtgctctgggtggccttggaccgacgctgataccgaacctgcctccgccaaccaacctcctgaaccgaccgcccgaatcgtatggagaaacctgccatgaatgcgaacatcgcaaacgaacaatccccggtagctgttccgcccgcaagttggctcctacgtgcgttcgctggcgttctgacctgtaggtggactgtctctgtctgttcgttgtcttcgccttgcttgcgttttgtacgttttatctgtttcgtgagtttcgtgcgttctgcggatttcacgcgtttcgcgtagtgccgcacgctgatcaccattcagcgtgcggcacttttgcatatctcacgtgttgcgggagatgccgattccgtcgcacaatacgtaaaacgtgaatgaaccactcactatgctgggttgtttgagcgtgatatgacatgcgccactttcccgggaatgcgttgcgaattggacctgttcggaggtgtgcagcgacgcattccggggaatgttgcgcttagagagccgcgtatcgttgctaatgcggggaacacgcagagttgcgggccgttgcgattagacgcaggtcgcctagactagtacgcgtttgcgaaagtcgaacgtgcttcgaccgatgaaggagagcttcggtcatgcggccaatgacaggcgcagtgcgaagcacggctgatcgtgaatcgcggcggcagcgattgccgcgtgcggcgcaggagcatgccgcaccataccacaagcaaacaatccccaagaaacggtgatctcctcacatgtacgtcgatccgggaatcaataccagcgcaagcaatctcaaatgggtgctgccatactgcaaaccagacctgccccgcgtggtaggcgcgcttctactgttcatcgcaaataacacgatggccctgaccattccgattctgtccggtatcatcgtggaccgcgtcatcgtcggcggacatgccgacgaactgccacgtctgtgtggactgatgatcctcatgaccatcatccgcgtgggcgcgcgatacggctaccagatgtggatggagcgtttcggccagaactcggtctaccgcctcgtctccgacgaatacgagaagctgcacgagctcgacttcacgtatttcaaccacacacgcaccggcgacatcatgagccgcctgacctccgacaccgacgcgatccgccactgcctgagttgggtgagctatcagattgccgactgcgtggtcatgttcgtgggcgccctgtgcgtgatgttcgccatcgattggcgactcgcgctcgtcctggcctgcgtcacgccgttcatttttgtgctcacgcgcggcctgtccacgcacgcccacccgctgttcttcgccatccgcaactcgctggcctccctcaactccatggtcgaagagaacatcgagggcaaccgtgtggtcaaggcattcgtgcgcgaaccgtacgagaccgaaaagttcgacgagcacaacgacgattacatgcagtgcaacatggccttggcctacaactcgcgcaagtacatgccgtggctggacggcctcggcttctcgctgcagctcatcaccctcggcctcggcggctttctggtcatcaagggctacatgaccctcggcaatctggtgagtttcaactccttcctgtggatgatcgacggcccggtgcgccagtccggctggctgatcaacgactggcagcgattcaacgccagctgcatcaaaatccgcaagctgctcaccgaacagccgcgcatcgtggagaagcccgacgcggtcgaagccgtcaagcaggcggtcacgatcgtcgagcaagtcaagcacgatgatgaggctaccggggctaccggagcgcccgtggcttccggaacatccggtgcccagcagtccaccgaacgcaagtcctgcccgctgcacatcaagggcgacatccgcttcgaccacgtcagcttcgccttcccggacgacccggagaccccgatcctcaaggacctcgacttcaccgtgcccgccggctccaagctcggcatcctcggcgaaaccggcgcgggcaagtccacgctcgtcagcctcatctcccgcttctacgacccgaccgttggccatgtgctcatcgacggcatcgacgcacgcgactggccgctggccaccttgcgctcgcaggtgtgcatcgtggcgcaggataccttcctgttctccgacaccatcggcggcaacatcggttttggtgccagcggtgatagcgacgaccgatatatccagaaaatggcccagatcgccggcgcggacaatttcatcaggtcgatgccacagggttatgacaccgtcgtgggcgaacgcggcgtgggcctgtccggcgggcagaagcagcgcctgtcgctggcccgcgcgctcgcggacaatccgtcgatcctgattatggacgatacgacctcggccgtcgatatggagaccgaggcggagatccagaagcacctcaaggagatggacggcggcaagaccatcgtcgccatcgcccaccgcatctcgtcggtcaaggattccgacctgattctggtgctcgagcacggacgtatcgtcgaacgcggcacccacgccgaactcgtggccgcacacggccgctactgggacatctaccacaagcagctcggactccagtccggcgtcgcacaaggtttttagaagaggacttatggcacaacgcaatacataccgcgaggatgaggaactcgaggagcagatcaacttccgggacatcctgcgcgtcggcaaatatctcaaaccgtatatggcacaggtggcgcgcattctcgtcgtcgtcatctcgatgagctgcatcgtcgtcgccgtgccgtacctgaccaagatcatgatcgacgaggcgatcccgaacaaggacctcggcaagctcggcatcctcgccgtgatcctcgccgcgctgatcgtgctgtacgagttcgggctgcgctaccgcacggtggcgatcacgcgcgtcggccagctcatgctcaaggacatgcgccgcgatatcttcacgcatatccagacgctgcccttcagctacttcgattcgcgcccgcacggcaagatcctgatccgcgtggtcaactatgtgaacacgctttcggacacgctgagctccggtctgatcaacgtgatctccgacgtgttcaccttcgtgatcacgctgatcgtgatgttcgtgatcgactggcagctggccctgtggagcctgatcctgttcccggtgctcatcatctgggtgcgcgtgctgcagatcttccagcggcgcgccttccagaagctctccaacaagcagagcaacctgaacgcctacatccacgagtcgattgccggcgtgaagaccacgcagaccttcgcacaggagcaggcccagttcaggaccttccaggaacagcagggcgaggtgcgttccgcgtggatgcacgccgtgcacatccagttcctcatgtggccgggcgtgcagaccatctccgtgatgaccatctcgttcatctacttcgtcggcgtgatgggcttcgggggcgtgaacgtgaccaccggcgtgctcatcgcgttcgtcggctacgcgaacaacttctggaatccggtgatcaacatcggcaacttctacaaccagctcatcacctgctcggcgtacctcgagcgcatcttcgagacgctcgacgtcacgccggagatccgcaacaagcccgacgcggcggacctgccgcagatccgcgggcgcgtcgacttcaacgacgtggtgttccgctacgagaaggacggccgcaacatcctcaacctcgtggacttccacgtcgaaccggggcgcacaatcgcgctggtcggcccgacgggcgccggcaagacgacgatcatcaacctgctgtcgcgcttctacgacgtgtccgagggctcggtgacgatcgacggctacgacgtgcgcgacgtgacgctcgcatcgctgcgccggcagatgggcgtgatgctgcaggacaccttcatcttctccggcaacgtgcgcgagaacatccgctacggcaagctcgacgccaccgacgaggaaatcgaggcggcggcgaaggccgtgcacgcgcacgagttcatcatggaactgcccgacgggtacgacacggtggtggaggagcgcggatcgaccctgtcggccggccagcgccagctcatcgccttcgcgcgcgtgctgctcgccgacccgcgtatcctgatcctggacgaggcgacgagcaacatcgacacgcgcaccgaggaggcgctgcaggccggcctgcagcatctgctcaaggggcgcacgagcttcatcatcgcgcaccgcctgtcgacgatcgagaacgcggacgagatcttctacatcgatcacggccagatcgtcgagcacggctcgcacgcgcagctgctcgccgccaagggcgcgtactaccgcctctacgaatcccagtacgcgatgattcgcgtggccagtggagcgccggaagagtgacgagatgttgctttaagtatgtttcgtgatgacattatcggtaacgataaacactgtgaaatatgtaacggtacgtgtgaaaaacatgcagtcgtgattggaatacgttctggaaaatgttgaaatagagcgaaacgcgctgaagtcggcacggggttgctgagtgtggcagatagtttagaatatgtaccgttacatatttgatgtgcagaagatgctcgcatcttctgcacgcgggtgaaatctggggagtggtttggcgatggcagacaaactggtagccacattggacaaagctggtgtacgcaagatcagcacggacctgtggggcgtgttcttcgaagacatcagctattcgggcgatggcgggctcaacagcgaactcgtgcaaaacggcgcgttcgaatacaaccgtgcggataagcccgagtggagcaactacaccgcttggcgcaagatcgtgcccgccggctcgttcgccgcattcggtgtgggggagaccgcgccggtggccgaagagaacccgcattacgcgattgccgaaatcggcaaggtgggcggcgagcagactgctgactcggctgtgtctcgggccgattcggccctatcccagacggattcggcttgtacccccgcagctcccgctctggaaaacctcggtttcgacggcatggtgttccgcgccggcgagacctacgatttttccatctggacccgtgcccacggcaaagcgctgcccgtgcaagtcgcactgattggcgatgatggcaagccgctcgctgccactgtcgtgaccgcacccgcctccaatgcttgcggcgaatggacccagcttcgcgccgaactgactattactagcgcacaggccgccccgcaacccaacgccgaaatcatcgccacccaaggcgctctccgcctgattttccccgaacccggcaccatcgaccttgacttcgtcagcctcgaaccgcgaaccacctataaggacctcaagcatttccgcccggatctggtcgaggcgctggccgacctacacccgcgcttcatgcgcttcccgggcggctgcatcacccacggactgggcctgaacaacatgtatcactgggaccgcaccatcggcccggtggagcatcgcccgcacaacttcaacgtatggggctaccaccagtcgttccgtatcggtttctacgagtactttcgcctgtgcgagaccatcggagccaagccgctgcccgtgctgccggccggcatgagctgccagaacaccagccagggcccggtgcctgtggctcaggaagacatgcccgcttacatcgacgaagtgctgggcctcatcgacttctgcaacgccgattcggccaccaacaagtgggccgccaagcgcgccgcaatgggccatatcgagccgttcaatctggagtatctcggcatcggcaacgaggacctgatcgacgacgtgttcaagaaccgcttccagcagattttcgacgccgtcaaagccgcgcaccccgaaatcaccgtggtcggcacggtcgggcctgcgccgagcggacaggactacgagcaaggttgggcgtatgcgcgcgaggccggcattccgatcgtggacgagcattcctaccagtcctccagctggtggtttcacaacctcgaccactacgatcacaccgaccgcaagggcccgaaggtctacctcggcgaatacggctcctgggacacccagctcatcaacggcttgtccgaagcggcgttcatgggccgcatggaattgaacggcgacgtggtgcacatggcgtcctacgcgccgctgttcgccaagaacggccacaccagctggaatccggacctcatctacttcgacaatgagaacgtctaccgcccgtacagctactgggtgcagcagatgtacgccaccaccaccgcagacaccgcttggccggtctcgcttgacggacccaccacgttgcgtcgtgacttgccgaataccgtaagcctgaagatcgatggcggcgcccacgccgatttcgccgacttctctctcgagacggccgatggcacgcatatcgatctgccggacgtgagctaccaaggcaatgggccggtgtctcttccggtacctgagggtctggcggccgattcatacaccattcgcgcgaaagtcacctattacgaaggcatgtggggcgtgcgaatcgcgtccggcgacgtaaacggcaagaactataacggtacttcgcttggccgtggattcagcgtgcaagtagtgcgcgaaggcaccggttatgcactcgccggcacggaaacttcaatggacgcggtacgccccggaactacgtgggatgtgcgcattgagattggcaatcgcggcgagcagatgcgactgtacatcgacggcgcgctggtcgccgacggccatgagacaccggacgagccgcgccggaccgtcaccgtatcccgcgattcgacggctggcgtgacttacttgcgtgttgtcaacgcgctgcctgaatccgtagacgtggacttggctcaggtgcttgctgcgctgaatgtgcctgattcagccaaggctgtagttgaggcaaccgtgcttaccggcaacgatccgtatgcagggattcggggagaggaatcaccgacttgccccacctcgcacgaagtcaaccttgctgacggtacatacaccgctcctgcttggtcgttcaccacgcttgccgtacgaggctaacccaatcattccgctcggtgatgcgcgcaatacgtgtgacggctatgccccggaatccgcagtaaggacggtcgcggcgatcgcgccggtcgccggggccgagtggaagcggtactacgacgatgtgacgtgggatccggacgaggccaagcgccgcaccaaggacgaccccaccaagcccgaagtcgagctctagcccgttgcggctgcaaccgtgccgagcatcaacgtgccgatccgtcgtgcagcctgatatcgttcccctcgctttctcaacggacatacagccgattcggatacggaaatcggctgtatgtccgtcagagggaagggaacagagaaaggggtttcagccctcgatgcgggcgccccagattgcttgattgccaccgatcgcggagaacgtcagcgtcgcccggccatcggtctccctcggtagtacggcgaacacgccggtgtacgtcatgccgtcgatcgtgatcgccatgtcgctgtcgcagcagtgcacgccggccggcgtcgcgccgagcatccgccacgatcctcgcgacacggggccgtcggtcgaccgcggcaggttcgcgtccggcgtatcgaagaagtcgaccacgccgccgctggtcacgcggccgtccggctgcagcgtgatcgtctcgggcagattcacgccatgccacgtgccgtccgcgttgcgcgtgccgttgaaatacgcgtgcggatcgtgacgtacgaattcgtagtcgccggacaccagcgatgggtgtgcgagatccgattcgtgtacggggcggacgcagtggcatagccgggcggccaagttcggcgcactgctgggtgcaacgatgtaatcgtcgaagccgtcatcgtcgtcgccgacggtcggatcggacgtgttcgcggcggtcggcgggacggctgccgcgccgcgatactcgtacggcgcggccgtcagccaaccgtccgcggtcggcagcagctcgcgcacatgcgtctcgtaatcctcgtcgccgcggtcgatgaaccgcgtatggtacgtgagaaacagtcggccgtccgaaccgcgcgtgagtacggaattgtgtccctgtgacacttcgaccgtatcgtcgtcggccggtccgccgctccatttcaccgacgacgtgagtcggatgccggtgtccttggtctgattgtcggggatttcaccgttggagatcgcggggttgccgttctggtcgacgtacgggccgacgaggttgcgcgaacggaacagacggatctggtagccgccggtgcggccgagccagccatacgccatgaacagataccaccagccgttgcggtgcacgaaatacgagccttcgccggagttccagtagccgccggcgaccttcacgccgtagtacgggtcggcggaatcgtggacgagcggatagcgcacgctgtagtcgcgcagaccggttttcggatcgagcttgaacatccagatgccgccgaaccacgagccgaaactcatccacagttcgccgtgatcgcagcggatcggcgcggcgtcgatcgcgttgatccgcgtatccttcaacgatgcataccgtgacagatcgccatgcgcggcctcgtcgccgagcacacgtggcacgtcggtgcggcccacattgtcaacgttgaaaccggagtagacgacaggaccgacgtatgtccagtcgccgtcgagacgatcggcggtgagcagcacgatcaccgaacggaattcgtgaccgttgaccgacaggtacatgcaccatttgcgcatcacgtcgttccagatcacgtccggcgcccacgtgttgccttcgagcgcggggttctccggctgcttcggccatgcctcccagatgccgccgagcagcgaggccgggtcgcgcgtcagattgttctcgaagcgttcccagtggacgaggtcggtactgcgggcgcagcgtcggtgggtgccgaagacgtagtacgtaccgttgtcctcgacgatggctgggtcgtggatggcgatgcggcccggggcgagcgggtgttcgacgaatcgttcatcggcgggcgattcggtcgtgggttcggtcgtggaggtggttgcggtcatgggttagcttctttgtgatacatgatgtctttctcttaacggacttacagccgatttcaccggtgaaatcggctgtaagtccgttaagagaaatggggtggttcaaagggaagggcgaggacgagggcgcgagggaagggcggcaatgagaaaggactacttctgcgaggcccaggcgcagaggttgtcgccgatgacggagaacgtcatctcgaccttgcggtcgtccttgtcgcgcggcagcctgtcgaatgcgccgtggtactccaccccgtcgagcgtgatggtcatgtcgccggtgccgtcggacttgtcgagcttccacgtgccggtcttgtcgccggtcaccttgccgtcctcggtcagcgtgatgttcaccggcttgttgacgccgcggtagtcggtgctgtgcttgtcggtgaccttcttcgggcccttgaacgaggtcctctggtcgtggatcacgaactcgtagtcgccggccacgttcttcgcgtcgtacttggtgtcggcggccttggtgccggtgtattcgtacggcgcggcgaccagccagccgtcgtcggtcggcagcagctcgcgcacgcgtacctggtgcatctcgccggtgtcggagaagcggctgtggtacacgatgtacgtggtgccgtcgtcgtccacgaacgccgagttgtggccctgcgcgacttcgatgtgcgagttgtcgttgccgctccactggatcgagctcatgagacgcacgccgacctcgctctgccagttgttgccgatggcgcgctcgctgactgcggcgttgccgttttcatcgatgtacggaccggtgatcttgtcggcgcggaacatgcgcacctggtagccgccggtctgctgcaggttgccgtaggatgcgaacagataccagtggccgttggtatgcagcaggtacgagccttcgccggagttgccgaagccgccgccgagcttgatgccgtagtaggcgtcggactggttcttgaccgtctggtacgtggtgctgtagtcgcgcaggccggtcttcggatcgagcttgaacatccacatgccgccgaaccatgagccgaacgtcatccacaggtcgccgttgtcgccctgcttgacgcacgggtcgatcgcgttgatgccggtgtcggtctgcgacgtgtaccgcgtcaggtcggcgccttcgccgagcaccttccagacgtcggtcttggaagcgttgaccttttcgaagccggagtaggtcaccgggccgacgtaagtccagtcgccctcgatgtcgtcggcggtgagcagcacgattgccgatcggtagttagcgccgttgatcgacatgtacatgcaccactttttcatcgttgcattccagatgacgtcaggggcccacatgttgcccttgacgtccgggttggcggactgcttcgaccagttggtccagatgtcggcgaagatcttctcgtagtcggtgctcaggttgtttttgaagctggtccagttgacgaggtcgtcgcttttcagccaggcgagatgcgacccgaagatgtagtacttgccgttggccttgacgatggatggatcgtgcgattcgccgcgcttgatctcggtggtgctggtctggctggagtcgctggagttcttggcgttcgacgatgcgttcgagttggcgttcgacgagcagccggccagcgtgccgatgagcatggcggccgccagtgtggtggcgaacgccttgcgtagggtgccggtgagagtcatgtgttcctcctgtgtgtgacagtggtgttgtgcagcgctgcgtttgtacaacgatgtaaactgaggtatactatacatcgacgtaaatgaactgtcgaaccgaaagggacaaggaatgtccgactcctactcactgctgtgctatacgcgtgtccccacgtcgcgcgaagaggcgaacaacgaggacatcgccttcagcatgcacctggcgctgcggtcgcatctcgacggctcgtggacgccgcttaacgaaaactacggcatcttcttcgctgccggcgtgccgatcgccgcggcgacgcccgaatcccgacgtgcgtgcaccgcggcggcacgattcaagaccgatccgtacacgacggtgcgagccgccagcgacgccgtcgcgcacggcgcggcgatgcccggcgtggacatcgaactcaaaagcctcaaggatccgcacctgttccggctggcgtccggccggttcgccgtggcggcgacccgcaccgcgcgcggcggcggcgcggacggatccgaacggtcggcgttcctgctggcgaccagccgcgacctgacgtcgtacgatcagcgcggactggtgctgcttggccccacgtccggcgtacaccgtcccacggtcatatacaacgatgcagaacgtcggtacgtcatccggtggcatgacgacgacggccacgcgatgcgcgcggtctgcgccgacatcatcgccgcggtcggcaccacgctgccggccgaaccggacgataccgccgaaccgattgccgcaagcaatgccaacgatgtcaacgcaacgtccgtccgtcgcgactacggcatcgcggacgccgtccccggcaacgaaatcgacatcaccgaacaggaagccgcgacgctcatcgcacgcttcggccgcgtttacaacaccggcgtcaccgtgccgtccatgaccgtctcggctgatctgtacgacggcgaagcccgtgacctcatcggctcgctcggccgcaccacggccaaactgcagtactccgacggatccaccgccatgcgcgccgtcgactgggacgccgcacagctcgccgccctcgccgacgacgccgcagctggcaggctcaagccgggcgaacgccgtacggtccgcggtcgcatccgccagaccgactatcccgtgccgttcgccgtcgaacgcgccgatccgtccgtgttcgcatggaattacaacggtgaacaactcttcatgttcattgccaccgacgataccgacggcaactgcgtcgatccaaacggcggccgcacgcacatgccgctgcgcgtggcgacgtccatcgccgacctgtcggatgccgccggcggccgcgaccgcgaaatcgacctgctcacccgcggcgaccgcaacagcgaaggccgcgcgatgaccggctgcttctgggcgcccgagctgcacgtgatcggcggcaagctgtccgtgctgttcatgccgtgcttcgacggccccgccgccgatccggacggcaccgcgaacgaccgcgccggcaaacccgacatgtggaccggtcgctgccatatcatgcagctcaggcaggatgccgacggccgtgacctcgacccgcgcgaccccgccaactggaccgttcccgagccgatcctcggccccggcgaacggatcctcaacccggtgcagcgcatctcgctcgacatgaccgtgatcgtcgactccggccgctggtactacgcgtggcagcaggtcggcagcgtatggatcgcgccgttcgacccgggccggccgacgcggctgaccggcgagccgacgcagatcgtcgtgccggaattcgcgtgggacaacatgatcgccgaagggccgaacgcattcgtgcacgagggaaagatcttcctgatctactccggatcgctcgtcggcatcgactacacgaccggactggtcaccgcgccggccggcgtgcgcgccgacctgaccgacccggccacgtggacgaaactcgactacccgctgcagaaatccggcatgtacaacggtgaatggcagctgggcaccggccacggcatgtggtcgcacgacgagggcggcaacctgatctacgtattccacaacgcggagtacgacaacgggcgatacggcgggcgtgacgcgcaggtacggcgcgtccactggtcgggcgagggcatgccgatcctcgacatgcagcgcgacgaggaactcaatcctgcttatgctggggtaacgatggaaatcgccgtgcggtaaagccgccatacggcggcgaacggggtggggttcggctctccggccccgccaacgtgcagtgcagtacgtggcgtaagccgctatttaccgagaacagaatactgaggattacccatggtcaagaaaacaaccgcgaaggacggcgatcacgtcgtcaccatgcgcgaggtcgccaaggcggccggtgtctccatcaaaaccgtgtcgaacgtggtcaacgactacgaattcgtctccgatgccacccgtgcgaaggtgcacaaggccatcgacgagctcggctatgtcatcaacgtgtccgcgcgcaacctgcgtcgcggcagcaccggcatcatcgcgctcgccatcccagacctgcagctgtcgtacttcgcgcagctttcatcgttgatcatcaccgaggcgaaaaagctcggcctgcgtgtgatcgtggaaccaacgttgtactcgcgcgaaggcgagctggacgcgctgcacggttcgcagaccgcgatggtggacggcctgatctacagcccgctcgaactcggtccggacgatgcggccgaagtcgaggtggactacccgctggtgctcatcggcgaacgcatcttcaccgacaaggtcgaccacatcgccaccgagaatgtcgaaggcgccaagcgcgccacctcgtacctgctgcagaccggatgcaagcgcgtcgccgtggtcggcgtgcacccgggcgaggaggtcggctcggccgcgttgcgattccgcggataccgcgaggcactggaggaggccggcgtgccgttcgacccggcgctcgtggtgccgtcgatcatgtggcaccgcaacgacggcgtggcggcgatgaacacgctgctcgactccggcgtacggccggacggcgtggtggcgctcaacgacatgctcgcctccggcgtgatgcactcgatccagatgcacgacctgcggattcccgaggacatttcggtgatcggcttcgacaactcggacgattcgcagtacctgtcgccggcgctgacgtcgatcgcaccggggctcgaggccgtggcgcggctgtcggtgcgcgcgctgaagaaccgcatcgacgggcagccgccgctggaaggcgacttgacggatcccatcttccgcaaggtgtcgtccacgctggtcgtgcgcagctccacccgcacgctctgagccgagccggtcggggcggcggcaccggttggacgaacaccgcactgccgccgtcgtctcgtcgtcgtacgttcgtacgggaatgtccgcgcagccgtacggcagctgagcgtcaacgcgcgcagttggagcgcatgaagtccgtggcaacgcggcacatgccgtccgtccagaattccgcgccgccatgatcggcgccttcgagcagatacagttcggccgacttgccgacgtcccgcagtcgccgatacaggctcgcgctctgccgcgcgttgaccagccgatccttggtgccgtggaggatcagcaccggcggcagcgccagttctggcgtcagataggattccacggtcatcgccgcgcgcagatccggccgatcgcgcaggtcgacgtgccccatcatcatgccttccggactggtggccagatgatggtcgacggtggaggggaagccgtcgtccatctgaccgttgaccgcgccgaaatagtcgatcacgccccgcgtcgcatccgacacgtcggcggcgttcggcgccagcgacagcgacgtgtcgtccatgtcggtacggtcggcggcatgcgcgaccgccgcgagcagcgcgacctgaccgcccgacgaacagcccgagaggaacagattgtcggcgtcggcatggtattgcgcggcgttggcgcgcatgaaccgcacggcattgcgcgcgtcctggatctgcgcggggaacgatgcgatgcccgaatgccggtattccacgatcgcgacgacgaagccgcgctccgcgatgcggctgagcgtggggacgagtgccgttcggtcctgcttcatccaggcggatccctgcacgtgcaccatgcacgggtaggtggtggcgtcggtctggttgcgggtctgcgggacgaggatctgcaggtgcaggggcgtggttccggcggttgcgtagggtacgtcgggatggtatgtcacgccgatctcgtcgccggtggtggggacacgcgtcgctccggggaccggctcgttgaaggctggaaaatcggcgtattcccacggtttgatgtccatgatgctccttcgcttcgaatgatgaacgctgatcgttgcgcaccatcattataacgttgtaattcggtgtgggtggtgcgggtgatgtgggcggtgtgggtggaatcggctgtatgtccgttggggaggatgagagggatggttgggttgggtggagtgtgcgttggcgggggcgggaaacgccgagttgttacatcgttgtacatctgctatattgcatcgatgtaaatactgagccacttggattggagaaggaaaaaaacaatgactgtttacaacaatccgatcgtgctccagcgtgcggatccgtgggtgcttaaggtcgacggcgaatactggttcaccgcatccgatcccgagtacgacaagattgccatccgtcacgcctcgacgatcaacgacctgcagaaggccccggagaccgtggtctggcgcaagcatgagtccggcgtatgcagcaagtacatctgggctcctgagctgcaccgcgtgaacggcgcgtggtacatctacttcgccggcgcggaacacgagttcgagccgaacggcatgcccacccaccgcatgttcgtgctggagaacaccgatgccgacccgaccaccgacaactgggtcgagaagggccagatcgtcacgccgatggactcgttctcgctcgacgcgaccaccgaggtgatcgacggcgtgcagtacctcgtctgggcgcagaaggactacgacatccccggcaactccaacctgtacatcgctccgatggcgaacccgtggacgctggccgctgatccggtgatgctcaccaagcccgagtatgactgggagtgcatcgacttcctcgtcaacgaaggtccggcgttcctgttccacgacgacaagatcttcatcacgtactctgcgtccggcaccggcgtgccgtatgcggtgggcctgctgaccgccgaccgtggcagcgacctcatggatccgaagagctggaccaagagcccggtgccggtgttcaagacctgcgccgagaacggccagtacggccccggccacaactcgttcaccaagtccgaggatgactccgaggatctgatgatctaccacgcgcgcaactacaccgaaatcaaaggcgatccgctgttcgacccgaaccgtcacgcccgtgtcggcgtggtgcgctggaacgaggacggcactcccgacttcggcgtgcctgagccggacaacctgtggacgcccgtcacgaccgacgtgctgccgcccgacggcggtccgaaagccggcaccccggcggtcgggctggccgcagaggcatagtcgtacgcggcggcggtcgtggtgcggcatgtcgcgcaggtcacgcgcaccgcatgcgtaacgtgcgcgacgttcgcgcgacggccgtcgtccatcaatcccataacagaacattcgacgtgtgcgaaacgttggtttcatcgatgtgaagtccggcgtctcgtgcggaaaacagcagttttctaggtgtgtcgaacgggttgcgcatccgatttgtacaacgatggaaaacgtgttatagtgaattccaacgttgtaaacgagcgctgaggctccacgaaccaaggtttatcaaccacgcaagttgcgcaacgatgttgtcgtcaaccgaacaccgtcgccagacggcggaccacagggtcgcccgcatgcaacgaccaagatttctgggaaaccggagtaccaaggaggaaaccaatgaagatcaagaagaacctcgtcgcggccacggcggccgtgcttgcggccggcatggcgctggtcggctgcggttccagcaacggaggcagcggcgacgtccagaagaccgccgacggcaaggtgaagatcaccatgtggcacggcttctccgaagccgacggcaagacgctggaatccatcgtcgacgacttcaacaagtcccaggacaagtacgagatcgacgcccagctgcagccatggagcaccatcggcgagacgatggtcaccaaggtcaccaccggcgacggcccggacttcgtcaccaccggtgccgacaatggccagggttggtccatcgacggcaccttccagtgcgtctccgatttctacgccgacaagaacaacggcaccggcgactacctcgacaacgtcgtcaagcagatcaccttcaacatcgacggcgaggaagagaagtgcgccgttccgatgggctacgcgccgacctccgtgtggtacaacaccgacatgtggaaggccgccggcctgaccgacaaggacattccgaccacctgggaccagctcctcgaggtcgccaagaagctcaccaagtccgacggttcgcagtacggcctcgcgatggccgactccggctgggccgcctacatgaagggcaacggcaccggcctgtacaccaccgacggcaaggtctccatcaactccaaggagaacaaggccttcctgcagaagatgcgtgacttctacaacggcggctacgccgtcccgggtctggacgacaccgcggcccgcgaatccttcgagtccggccagtccgcaatggtgatcgtcggcccgtgggaagaccaggcggccaccgacaagggcatcaaccacgacaccttcgccgttccggacggcgacggcacctacaagtacgccgacggcaagaccggctccaacaccggctccaccggcctgtactggtgggtcacctcgcaggtcggcgactccgagaagctgcccggcatctacgagttcttcaagttctacaacaaccacgacaaccaggtgaagtggtccctcggctccgcctacccgccgaacaacaagaccgtcaccgccgatgagctgtccgaccgtccgctgatcgccaagatctcgcagtacaccgacaactcctacatcggcatcgccggcctcaagggcggcttcggcgacatcgccgcctccctcgacaccctgacccagaacaccgtccgcaccggcgacgacatccagggtctgctcgaccaggccgagagctccatctcgggctacctcgacgagtacgccgagtagtgagcggcaacccgcaacccaatcccacgcatagctgacagcagctgaccgacgttccccttcccagccaattcccgaaagggaaggggaacgtttccattcccgacaaccaatcatgtgtccttttggaggagcaaaatgaccacagcaacgtcgcaaggcgaagcgcacgaggtcgccaaggagaacaagaaggccattcaggcgcgcaacctgcgcaccggcgtcctgttcaccgcgcccgcgctcatcgtcctcgccatcttcgtcttctacccggccatccagacgttcatcacgtccctgaccaacggccgcatcaattccaacgcacgccgacccgccaaattcattggcttccagaactacatcacgctgttccagagccaggacttctggaccgacgtcaagaacaccctcgtctacgcggtgctgtacgccccgatcgtcgtgatcatcgcgctcgcgttcgcactgctgctcaaccgcaaggacctcaagttcgtcggcttcttccgcacctgcatgttcctgccgttcgtcatctcgctgaccgtcgccgcgatcgcatggcagttcatcctctccccgtccctcggtctcatcccgtactgggtctcgctgctcggcggtccgtcgcacctcgacctgctcggtacacgcgaaacgtcgatggccaccatcgtcttcatcaccgtgtggaagaacttcggctacttcatggtcatcttcctcgccggcctgcagggcatctccgccgaactgtacgaagccgcctcgctcgacggcgccagcgcatggcagaagttccgctacatcacgctgccggccctccgcccgaccttcaactacgtggtcatcttcggcctcatcggctccttccaggtcttcgatcaggtcttcatcctgacctccggcggcccggcccgctccactgaaaccatcgtgtaccgcatctacaccgaggcgttcggcaacggcaagctcggctacgcgtccgcgctgtcgtacgtgctgctcatcatgacgctcatcgtcggcctcatccagctgtacaccaacaacaagcatgagaaggaggagatcgcatgagcaccgcaaccgcaacctccatgaaactgaccgcggaacaggaatccgaaaacgctcgcatcaacgccgaaaacgaacgtctgcgcaagcaggcgcgcgccaagcgcaccatcagcctgacgctgagctacgtcgcgctggcactggtgacgttcctcatgatcttcccgctgatcatcgtcgtgatcgtctcgttcacgccgaacgccgtcacgcagacctggccgccgaagatcattccgagcgcgtggacgctcgacaactacacgagcctgttccagcgcctgccgatcgggcgcgagctgctcaacaccatcgtgttcgccggcgcggtcacgatcatctccgtgttcttcgactcgctcgccgcctacggcctgtcccgcgtggacttcaagggccgcggcatcctgctcgccgtgctcatcgccaccatgatgatcccggccatggcgctgctcatcccggtctacaagctcctcggctccatgggcctcgtcaacagctacctcggcattatcatcccgcgtatggccgatgtcggcggcatcttcctgctgcgtcagttcttcatctccatcccgaaggacctcgacaacgcggcccgcatcgacggcgcgggcgagttccgcatcttcgcgcagatcatcctgccgaacgcggtgccggcgatcctgaccgtgggcatgttcaacttcatgggcaactggaacgacctgctctggccgttgatcatgacctccaagccggagacccgcaccatcaccgccggtctggccatgctgaccggtcacggttcgtccgtcacgccgtacggcgtggtgatggccggcgcgctgatctccgccctgccgttgctcatcgtgttcttcttcgtgcagaagcgcttcgtcgaaggcatcgcgatgaccggcatgaagtaaacggcgcgcgcgggccgggtgggctggcttgtgcctggctgggccggctggactggctggactggctggactggctgcggccggctgagtctgttcgtctcctgtccgcaccggtccgcgcgatcgttcgcttcacttactacacgtaccctccttcctttcatcaccgtctccggcgccgcttgtacagggcgccggggcaggccgtcaccgtggctcctcccgcggtggcggccttttgtgggtatgtgaaatatgtggttgaagtttggtgattctccggttgaggcaacgaggctccccgcaaaggtcttttggtaagtcttaggttgaaatactgtattggtgcaggtctcgatggacatattcggccagaccttcgtgttcttcgtggtgtacgactggaatcatacggctgcgttcgcctcactgttgctgggttgcgcggcgatttcgctgccgctgatgccgctgttcggcatcggcatgaccaaactcggtccgcggtggaatggcgacgcattcccgggattgtgtcgcagattgggcctgtgtgggtggattcgtaacactttcccgggaatgttgcgcacgatggtgcgtttagcggcgtttcacgtagcgggtgctgcggccagcaccgattttgatgatcgtaccggagtccaacagtgatttcagcgtgcgctcaatggtggtggtgctggtatcgggcatgcgagcgagaatatcggccttggagagtggaactagggattgatcaagcagtgcttcaatccgcgttcccttggtggctactcgcggtgctccctgcgctctgccgcctgccgtgagattgatgcgttcgtcgaattccttgcacgcggacagtatgatgccaagcaggtagttcgtgaatggcgcataatcattggcgttgtcgtcccagccttgggtgcttgcggccagcgcctcataataagtgcttttactttgctcgataaggtgttcgatactgatgtatttgccgaccatatagccattgcggtacagcatcaggagcgtgagtagccgactcatgcggccattgccgtcattgaacggatgtatgcaggtgaaatcgagaatgaacatggcgatggcaagcaatggatcggtatgtccatctcggattgcttgcgtgtaggcggaacacgcgcgttcgatcagttccggtgtggcaagtgcggacggtggggcgaatcgcacggtgctggtcccgtgtgcatctcgttcgatgatgacgttgtcactgtccttgaaatgccccgcaaaggtcagtggtgtgtgtcggaagaggtcgcggtgcagttgaagaatgacgttcggggtaatcggaatatagtcgtggctttcgtgaatagctgatagcgcgtcacggtaaccggcaatttcttcttcattgcgattgcgcggtgtggctttctccgagacgagatcgttgagcctgctatcgctggtagaaataccttcgatgcggtttgaggcatctgtgctttggatgcgcgcgacggcaaccagcgtccccaatatatccggtctgatcgttgtctgtatgctttgacgcccttttgcctcgtgaatagcggcaagcaaactcgtggtgtgcggggtgagcaacgtcttacctgattcgatgtagtcaaatgatctcatactgcctcattttctgcatcatacgaacttttctacatcatattttatcaaaatgaggcagaaaatgggctgatgaggcagaaaaggcggcaggatggcggccgtctcgcttgccggttgcgttacttttccgggaatgttgcgctcgtggcaagagacggcaagttcaggcggccgagattggcgatacccgtcgtgtagtcgaacatcttaccggactgccttacgagcgttgctgacggtagcctacactgagaaacagcttacactgagaaaccatgagcaagcaccaccatcgcgaccgtagctgggccccggcacctgaagcattgccggacgacgcccagaccatcgacaaccacactcacgtggcctccgtaatccctttcgcgcgcgctatgagccatgaggcgcaggagaaggggcagcccgaagtcccggtgtacgacgtcgaccaattgctggcgcaggcgcaatctgtcggcattgggggtatcatcgactgcggttgcgagctgccgcacctgatgaccgccgtccagatggccctcgatcatccaggtaacgtgcacgcggcgctcgcaatacaccccaatgagtccgtgctccacgggcatcgcggtgtgccggggccggatggtctgcctctcaaatacaagccttaccatgacacgtctttcgaggacgcgctcgccgaagtacatcgcctcgccaccacataccccgagcaagtggtggctatcggcgagaccggcatggacctcttccgcaccggcgaaggtgccaaggaactgcagcgcgaggctttccgcgcgcatattgccctggccaaggaactgggcctgcccatgcagattcacgaccgcgactcccatcgcgaggtcatcgaaaccctgctggtcgacggcgcgcccgaacgcaccgtattccactcgtattccggcgaccgtgagatggccgagattgcgcgcgaacatggctggtatctgagcttctccggcaccgtgagctacaaaggcaatgacggtatccgcgaatcgctacggattgtgggtctgggccatgcgatggtcgaaaccgacgcgccgtatctgacgcccatgccgtaccgtggccgcaccaacgcgccgtacatgatcccctacaccttgcgggccatggccgatacgctcgacctgtccatcgcggatgtggcgcgcggcacccgcgataccgcccgcgccgtatacggactgtgagggccgggtgtgcggccgtcgcggcgatgtgttgacttgtaaaatttgtcagaattgtgaacgaggtctaccatgatgtacctgacataagcgagggggatgatctccacctcaatggaggactgaacgtatggctgagtcgaaccaaaggaccgcacgcgcccaaaaagcctcaaaggcccagaaagcccagtctggtgccgccaaagccaaggcccgacaggaagaagaagcactgctgagggccgacacctttaccaacgctcccaaggtgtcccgccgcactctcaccaaggaggagcgcgaggcactcgccaagcagagggaagctgaaaccaaagaagccgagaaaatcgccaggcatggtcgaaaggcggcctcggtcgatggtgggcccgcctgcaatccagcccagacaaggtcacctggggcatggcaatcgtggcgctcggcgtggtgtacggcgacatcggcacctcgcccttgtacaccgcgcagaccttccttgccggtcagggagggcttggcagcgtagaccgagaggccgtgctcggcatgctgtcgctggtcttctggtcgattacgctgatcactaccgtcaaatatgtgctcatcgccatgcgcatcgacaacaatggcgaaggcggcatcttcgcactgtactcgttgattcgcaagtacggcgcatggctcgcgattcccgccatgctcggcggcgcggcattcctcgcggattcggtacttaccccggcggtttccatcagttccgcagtcgaaggcttgcagaccctgccgccattggaagggttgttcgacgaaaacccaagcctgaccctgatgatcaccgtcgtgatcatcgtgattctcttctccgtgcagtcgcgcggcaccgaaagcatcggcaaagtattcggctcgatggtgctggtctggttcggcttcctcgccatcgtgggcgtcacgaatctctctaacgactggtctgtgttcgaggccctgaacccggtgtacggcatcaaattcctgttcagcccgaacaatgctgccggcatcgcccttatgggcaccgtgttcctctcgaccaccggtgccgaggcgctgtactccgacatgggccacgtggggcgcggcaacatctacttcacttggccattcatcaaggttgcgctggtgctcaactacttcggccaaggtgcgtggatgctggccaatagcgataacccgcaatacactgcgatggagtcactcaacccgttcttccagatgatgtctccgaacgtacgttatctggccgtgattctgtctgtttcggccggcgtgatcgcttcccaggccctgattaccggcgcgttcaccatggtctccgaagccacccgcctcaattggatgcctcatctgcaggtgcggtacccggcccgcacgcgtggccagctgtacattccggtggtcaacggcgtgctgtgcgtctccacactggccgtactcgccatcttcaaggattcggaacacatctctgccgcatatggactggcgttgaccattacgatgatcaccaccaccgtgttgctcggcgtctacctatggcattccggcaagcgggtcggtgccatcgtgttcaccgtgctgttcttggcgattcaggccatgttcttcatcgcgtctatggccaaattcctgcatggtggttggttcaccatgttgctgaccgccgcgattctgttcgtcatgtacacgtggaatgagggcaccaagctcgaacgtgcgcaacgccgtcacatgcggcccaacgacttcctacccgcgctcgacaagctgcacagtgatttccgcatcccgtattttgcggacaacatcgtgtacctgacctccgactcggaaaccaagcgactcgacacggacatcttcttctccatcttcgccgaccaccccaagcgcgcccgtgcttggtgggcagtcagcgtggaaaccaccgacgagccgttcacccgtgaatactcggtggaggacttcggcacgaactacatctaccgcgtgcgcttccgtctgggattcaaggtttcgcagtccatcccggcgtacatccaccagatcatgcacgacctgtccaaaaccggcgaactgcctaagcagaagtcgatttaccccaaggtcgacgccgatccggacatcggcaccatccgttacgtgctgattcacaaggccctgatgccggaatccaaggtttctgcacgcggtgccctgtcgttgcaagccaagtacgcaatccgccacatggccggctcgccggttaagtggttcggtctggcaccttacaacccgttggtcgaggtgcagccgctgttcgtctccacccgccgcccaccgcgtctgaagcgcaccgatacggccaagaccatcccgacgcccacgccgactcgtgcagtggccgacccggccgccgtccctgacccgatggacaccacgtccgggcttgggcgattggtacaggagctcgatgccgccgtatcggccgaggcgcggaagaccgctgaggccgctgccgccgatgcgcccgctgagcagggcgataagggcgataagggcaaggccgagaacggcaaacccgccgccaagcctcagcgctccgccaaacagaagcgataacataccagtttgcagcggcgctgatgcgctctataaagaatgcctataacggtcgccgcacgtcgccacacggtttcggtaagttgaaataccatgtgcagattactgggatacgcgacggcaggcttcaacctgagtctcaacgctgtgttggggcaagacaatgtcgaggatttccgtgaactgtctgaaatccacaatgatggctggggtgtagcccagctttccgatcctgccgaagcaccgcacgtgcgcgacggtggcgcacccaccccggaaaccggcacccgaatctacaagtcgaccatcgcggcccgtcatgacagcacgtttgaggcgctggccgacgaaccgtctcgcggtgccatctggcacctgcgcttggcaagttccaatctgccgctcatcatggagaaccagcacccgttctatgcgaacggcctgagcttcatccacaacggcgatatctcggacgccaatggccgcaacatcgtcaccaaccgctcatacccggtgaaccacagcgtgttcctctccaccggcggccgttccgactccgccatcttcttcgcggtgattctggaatacatcggcttcggcttctcgctcgacgaggccgtggcccaggccgtgcgcgaactgcgccaagcctacccgaagtccagctacaactgcatgattcagtccgaggaccagctcatcgccctgtgcgccgccggtcgtgagaagaccagcccgcgcatcgtggaaatctacgatgagtacggccgtggcgagcaggccgccgactaccgtgtgatgcgctaccgtgagctgcgcgacgacaacggcgactccgccggtgtggtggtctcctcttccggctacaagcaggaaggctggaacgtgctggagaacgaccagatgatcatcgtctccaaccgcaacggcacctaccgtctccgttccatctgaaataccttcataagccccctctgacgagggggctgtcagccgacaggctgacttggggggagacccctagagcctcaaatcatccgcatcccatacttctccgccaacgccggaatatccggcacgccatacttggccaccagatccagccatcgctgtttgttctctccgccaaatcgctcggctcgggccgtatacgcctcgacctgcaggaacttcggcggcactgacttgctatggaacttgtcggcgtacatcaccacttcctgctcgagattcatcggcacatagtcggctggtggcaacggcagctcctggcgcaccacatcctcgcgcgtaagtcccacgccggtatggttgcggcagaactgggcgatggactcgtccacgccctcgtcgagcagatactcgtagcccttaagaccgtgcagaatgtagcgtttcttgctgaatttgagcggttcgccgtcagagccgtcatgcttgaacacgcggtaggtgccgatgtcatgcagcagtccgccgatgagtaccaaatgctcgtcgagcagacgcggcggcacatggccgccggtgacgcctgcggtgggcggtacctccgcgtccttcggtaatgtgcagcggcgcgtaaacagcgcgttctgccggcgcacgatctggcagccgatggtcgctacaatcacgcaatgcgtgtgcaccagctcgtacgccgccttggacggcgcgattttgcggtgcaactcgtcgatctgctccagtgtgggaatatatccggtcatgattatcaggtttcgcctcgtacggtcagatttatcctcagattagcgcggcaatgagccgcggcattgaaaaacccctgtgattcggcaatacgaatcacagggggctctatggtctgaacatcagatttcgaagagtgtgtcggctgcttcggcgatttcgcgcgacgcagtgagcacgataacgcagtgcttcgggtcaccggtgtgcgccagcttggccagcgcggcgaacacggtcacctcgtcatccgcgttcagccctcgtgtcggctcgtcgaggatcagcacctcggcttcggtgctgattgcacgggcgatggccaccaaacgctgctgtaccaaaggcaatgtgccgacggccacgccgctggtggcctcagagaagccgaccttggccagcagttcgcgggcgattaccggcttgggcttcaggaagttgcggttggacgcattcatggcgtacagcacgttttgttcggcgtcgatcttcggctgcacggcgtgcagctgcggtacgatgcccagacggtggccgcgcagttccacgggctcgagctcaacaatgttggcgctcttgttcatcaccgtgccagacgccggcgtggtcaaaccgctcatcacgcccatcagcgcgcgacgcttggcgtcggcggtgatgcccgaatcggggtcgtcgctgatcagcagcgcgtatgcgtgtccggaatagcagaagaaattcgcgccatcgaggatgttgaccttgcccttgggtccggcgaccgtcaccttgttcagggcgaaggtcgggtaggtcttgagcagaatgtcgtcggaaccgccgcccaccaacacgcgatcgatacgtgaggccagcgtcatggtgggttcggacgctttgccctgaggctccgcatgctcggccaatgcgtctttgtgatcggttttggccagtcggagtgtttcgttgacgcgggcggcattgcgctcggtcacttcggcggatgcgttggccgaagcgatggcgtctgcttcggcctcgctggtctcgtcggtttctccggtttcggcagatgccagtgcgctgtaaataccatcgtcaacagtgccttcgtcatcaacgtcatcgaaggtcacgctgaactgcatggagtcagctggaacggattcaatggcgtcgttcgtctcagtctcagaagtcgcttcgtcagccgttgcgtcagtggtcttctcgagttcctgatcgttgttcctgtcgctcatgcctgtgcctccgcatcgtcggttgtggtggtcgtcttgttggtctcgctcacggtgccccagtcgccatcggcggcaaacagcttgttcgcgctgaagaacgcaaggcgcagggcggcaagaatcgccaggatcaggattgaacccagtccataccagaccatggtccaaatcaggcccgatgtcaccggggtggcatggccggatgccagggcagatccgatcggattggcggcgaacgcgcctccgaccagaccaatcacgtagaagggcagggtgacgatgaacacttccagcatgaactgccatcccaaacgcccgcgagtgacgccggacaccagtgccatgccgatctcgtcgtcacgcttggacgcccacacgcccgacagcacgaggatgagcaacagcacgccgcccacggcaaccaacacaatggtgccggtcttcgcgcgcgaggatagcgtatccagcggctccagagaagcgttgtaggattccagcgagggggaagagaactcgtaacccttggcgggcagcttggacttcttgagggtggataccaaggacttgtatgtagcggaatcaccggcgtcgaacaccacgtccagatccgggactgcccagccggagacggtcttgtcggtggactgtgggtcgagtccggccttggcgaaggtctgatagttggtgaagatcgcgttctcgcggttgcgggcggccgtcaccggattggcgacggcggattcggatgtgtacttgtagatgccgcgcaccttgagctcggccgtggtctgggcgtccgaggcggccgccaccttgagcgtatcgcccaccttcaggttgttggcggaggcaaacgcttcagagaccagtgcgccggtggtgttcgggttggaggactggttgttgtagctcaggtccttgccgtccacgatttcgaaggtaccgaggtcgctggccttggcggcatcctcggtccagaaggctcgccaaatgagctggccgccggtctcatcatcggaggccgagcccagcgatccgccgtccagggccttcaaatcaccgctcacgcgggccggcacggtttcggtaaccgtgaagttcaacgagttggtggccgactggacgagcgtggcgtattcggtgtatgaggtccacgtcatgtaatgcttggtggaagccgagtccgtagcggagaccttcttccacgtagccgcagtcgggcgaatggccaacgtggccttctgctgatcgtacgtggtggtgtgtgcgttggtatcttcttgaatgatggccagtccggcgactgtgccgaaggtgaccgccaaggtgatgaacgcggtcagggccgtacgtcctttagaacgtgtcagggcccgccaggcgttgctgaggacgaacatgtaattacctctcccgttctcctaagccgaacagatcaatacggctttaactattgttgcgtttagtgaccgttttcttgcgcaatactgttatacccctcaatgaagtctgagaacattctgacagcgatgtggtggtcatgaggggatttgcacccggtatgggataaaccctcggtctatttcggtggcatcggtacactggcatgagatatgcgtggcgtcacgtgtgctccggcatgtctgcgattccggattcgcccggagtccggcatccggaagcgtggccttgcgccgttggataagagtatgagctgagcagattttcgggtaggataagtatgcgattcacttcagggcattcgagccataaggctgtggggcgtaggagaagccgccatgccggtaacgggaaatccaatcgctccgcatctacgaatagcgctgcaaatcagcagacgggtcccgtaaacctgaagactccccagcacgtgggtggcaacggccgttcgctgatcagccgtacaccgatatgggcgcgagtggtggttgtactgctgctgacgttgctggccagcgtcacctgtgtgggcacgctctacgcggcatccgtctcgagaatggccgcggatgcgcagcgtgtgctgacatccgccgaaagtctggccaattcggcacttggctgtggcagcgataagagtctgtcggacatctcccaagagctggtcaatgccaccaatgatctcaatgcggagctgaacggcccacagtgggacttcttccgcgaccattcgcgattcggaagcgacatcaccgccgcccgcgaaatgctggcttccgtggatacgctggtcaacggtccgttcactgatctgctgaacctgtccaaacgattgcagggcttctccctgaagaatggctcggtggacgtcagcgccctgatggatatgccggatatcgtcaagcaggcgcataaggatatctcgcagcagctcaccaagctcaacaaggtgccgactccgagcgtcgccaaggtggccaccgtgctcgaaaccgaaaaggctgcgctcaagaccgtggattcgatgctcggcgaatacgatggcctcattaacttgctaccgcaactgcttggcgaggacggcaagcgcacgtatttggtgatggtgcagaacccggccgagctacgttcggcgggcggcatggtaggcaccatcgccgcaatcacggcagataagggcacgattaccatcggtgatttcgccaccacttctggttgggacattcctgaggagccaatggatgatacggtgctgaaggagcgccaggtatttggtggcacttttgaccagtacccggccaccacgaccatcgaccccgaattccagcgtgtggcacagatgaacaaatacatgtggctgtatcagaaaggcaacgaagacgagaacgtagcgggtgtattgtcactcgatcccgtatttctccaggcattgctgggagccacaggcgaggtcaagctttcggacggccgagtgctggatagcaccaccacggtgccgttcttcgcttcagacctgtacacggattacccggacttcgagcagcagaacaacttcgtttccgaagcggctcaagcaattatgaaccatgtgcttggcaacgcgaatgcctctaccgcatccccgctgttgaaggcaattagagataccagcgctagcggtcatttcaagctatggatggctgatccggatgagcaggaggcgctgattgccaccggacttatcgacgataaggccagtggcgagttgtctgctgacagtcaggtgcccgaagccggcatctatctttcggagctgcagcaaggcaagcaggattggtatctgaagacctccaccacggtcacaaaaacctgcggcgacgcctcagccagccagaacgccctgtattctggcgtgctggataagcgcatcacgacagccgtgcgtaacacgcatctgggtcagtttacggaagatcagctcggtgacgaatacacggtcaccttcaccatgaagaacacgctgactaaggctaaggccgaatcgttgcctgatttcgttaatggcggctcggagaatccagtgctcggcggcatgttgtaccgcgtggtgcttaccgctccgtacggtggcgagatcaccgctgtgcaggctgatatagattcatggggtaccaacaccgcgagcctgtatgaccgtcagtacattatgttcaaccagcagtggatcgagcccggaaaagaattgacgattgcttataccgttcgggtcagcagcgatgccacacatccactgaacgtggtaaccacgccggtggtgaatgcggatggcgtcgagacgggctccaacggtaatgtgaccgatgagtgcacggcggatacgaacggcgccgatggtgcgaacggtgccgatggtgcgaacggcggcgcgaacggcggcgcggacggcggcaagaacgacgcgcataaggacgcgtcctccgatccctcggccggcctggacgccttggacaagttgaagagccagatcagctgcccggtcgatctgaagtccctggcgggatccatgtgatgaccatgcccgattccgtttccggcgtcgccggcaggccgcgcgacgtgaactacgatctgctgcgcgtggtggcgatgtgcctggtcatcggcgtccacgtgatcaacaactacatgcccgtcaagatgaccctcgccggcagcgcggaaacggtgcgatccgtgctgttcgcgttgttcatggtctgcaatccgctgttcattatggtgtccggccggttcaacctgacgtgcgacgccggccggctggggagcacccgctcgtcgggcaacctgccgggctctggctctgatgcccgggcaggcggcggtgccggccaagccgatcccagcagcctcgcgccgtacgtgcgctactactacaaacgttttatctcgctgattgtgccgtatctgctgtatgcgggcggcatgggattcgtcgcctacctggtgatcgatcatcgttcggttggcggcgctgtgtctggaacgttgttcgatctgttctccgggtatgacgattccgtctattggttcgtgttcatgcttgccgggtttgtgctggcaacgccgttcctggccgcgatgatgcgtacgataggccgatcgggagcctggttgctggtcgggctggccgccgccgtggccgctgccgagcatatatgcgatcttgtcggatatccgttgacgttcctgcagtcattcccttggcgtggactgctgatctactacctgttgggattcgtgttggaatactatccgccgtccgcgcgtatacggcgcggcgtgtatgcgttggcaccattcgccctggcctggacagtcgccacgccatatctgttcgccggccagcagatgcaggttggccgcacggtcacggttgcgttcgcgatggtggtaatggcgacgttcctgttcttccggtacgacgtgcacattacgtcggcgcgggtgcgtaaggcgattatctggctggctggatattcctacacgatttatttggtgcactcgccactgtccaaggtgctgattggcccgaggattcccgtgcctacggacggatggtcgtatgcgggtatcagcgtgctgatgtttggcgctacgttgctggcggcgctgctatttgcggtgattgccgataccgtggtgcttaagcccgtgcagcgtctgctgcggaaggtacggctgtagattcggatacggcgctatgccacggtatcaaagccaggaatcccagcagcagaagcggagtgaacgtgaatttcgacatgcccatcagcgcgcccacggtcatgagcgcggccaatcgtccgttgccggcgcgcgggtcggccatgcaggaaaacagcaggcacgcgaacaataggcacagcgcctgtgccatggaatcggccgagatggcgaactgaatccaatcacggctcacgcacccgcccacattgccgctgcccgaatgcaggatgctggtcgagtcgaccggccgagccagcacatccccgttgacaatgccgtcgatgcgatacgtgtgcgcccatacgtctggaatatgcccggcaggcgtcaccgcgatcagcatgaaaccctcgcggcactgcggaacacggaccccaagggccagctccaccgcgcctggcagctcagggaactcctccgcaccctgctcagacacccgctcgaacaggccaggggcgagttgaaacactgggtgttctgggcgtcccacagccgcatccccgagatcacggaactcgccaggaagattcgcaggcgccggcccgacatcctcaggaccatcgagctgggctactccaacgccaggctcgaggcgtccgacaacaggatcaaagtcaccatccgcatggcctacggcttccaccacgtcgacaacctcaccgccctgatcacgctccgatgcggtggactcgacatccgactaccacaacccacgatctaacccacgaaagcagcagaagcctctaagaagtccgctctctccattagcacgcgagcaaaatccaatctcatcgcgcccccaagaacgaagtaatataccgattgagcattgtgacaccgctatgagtctgctcaaggagttgtcggttgccttcaatgcgtttctctaatcctttaatggtttgtccggattgatcagcatctgttcctttgataacaacagcttgctcctccgactcttgcttttcttcacgcctagcatttacttcatcggcaacctcgctcagtaaatgattcttaagctgtcgtttagcctcctgaagcctcatggcaaaagattgagccacctatgcgatggatttgcgaactatcttcaagaatcgtctaggccaaaatccggcactctctattatgggccatggaaagaatagctttggctcttcaagtacttgtgtaagcagaatatctaatcctgcttaccggttattagcgtctgacctcgactggcttgtcggggcgggcgtcaccatcgcggcctataacgtggacgaaccatgtacgcctctcgaaatatgcaagaaacggaacttgttcaaacttttctacaacgatgtcagtctactgaccgaatcgcccctacgcaaaacgcaaaccgcgctcgatgtgctcggcctgcgcacgccagcacggagggggcgaatcacctacttgcccatctacatggccggaccgttcctcaacgaataattttcccctagccggtagaccactacgccaatacccctcagcatcctcccagtgaacgtttagtgaatttgttctgaactaatcgctacaatatgcgggtacgttgttgtgacgagggtacaggtgaatggcagtgagcagacagtgcaaaacgcgcggcaatcgcacgaagacgggaacctcccagctcggggttcccgattcttccgaggcggcccatcattctgcatcatcggctaggtcccgtttcagtccgcgagtcggattgctcacgtttgttgcttctcggcgccgcgttcaccaacccaaaacagattcagcagagactactgtgctcgctgacgaaatcgaggatttggataccactacacccgattctgcggatactgggattgccgaaaccagcgctgattcgctgaactctgcatcggaagtcagcaatgacgatatcgacaatgctcaggctgaatcgaacgctaaagattccgacaccgaagacaccaccgcaaaagaccagagaagcaaaaagaccaatagccgaaagcataagaaaccacagaaaccgaataaaatcaaagcatcgcttgcccgtttgaaccaattcatcaaagcaaatgctgcgcctattctgacttccaaattcgcacaactcctgatttcagctgcggtagcgctccacaaactatggaagaaacgcccaaagtgtccgtacacgttgtatgtcgtagtgatggcgctgattgacgcagcagccgtaaccttcattcagtggggcatgtattccgagccgaagtatgacgacccgaacgcggtggatagcactaccaagattctcaacagcgtaaacggccaactcaccagattcgtgacgcaaatgtggctagaagaagacaagctcaactggcttcttaatttcctagctctcggcatggtctacttggtgctggtatttgtcattaaccggttctgggtggcgaccgccgtattcgccatcacgatgagcgtgtacgccgtagcgaacagtatcaagataatactgcgcaacgaaccaattctcccctccgatctcagcttcctgtccagcggcaacggtggcgaaatcacttcgttcattcccaaaagcagtcaggcattggtagacggcaccatcaccatgctcatctggctgacggtcatctgcctgatactgcaattcgtagacggacgccgttgtgtcatcccattccactggtggcgtccattccgtaacgtgaaaacgattatcggcaatgtcacccgcattatcgcagcggcaatgagcatcacgctgctgtgctcgttcacatggacgctcagtattccaggagcttggggatatgaatgggcaaagtcttggggtgattcaccgcaactctggagtgccgaaggtgatgcagcaaacaacggtcctgtcatcaatttcctgcgcctcacgcacccgaaaatcatggataagcccgaggggtacagccaggaaacgatggaagagctggccaagaaatacagctccgaggcaaaccagattaatggaacgcgtgctaataacctcaccgataacaccgtcatcatgattctttcggagagcttctccgacccaacacgcgtgcccggcatcgccttggccgaagacccgatgcccaacatccgagccctgaaagaaacaaccacctccggtctgatgctctccccaggcttcggcggaggcaccgcgaacatcgagtaccagtcgctcaccggattggatcttgccctgtttgacgattcgatgcaatccatgtaccaggagctcgtcccgcatcaaaagaacccattcgcgtggaaccaaatctggaacacggaatatggtaaatccggttccgtggcattccatccgtattacaagaacatgtatttgcgcgactccaactacaagaagttcggattcggcaagttctacacgctggacagcaagccggcaatcacgaaccaagaccgaatcgacaattcgccgtacgtcagcgatgcggcttcctaccagaacatcatcgaccaactgaacaaagaggaacaccctcagttcctgcagctcgtcaccatgcagaatcacatgacttacgacaactggtactccaataatcagttcgactgggccgacactacagaaaacctgaacgattacgaacgcggacaaatcaacacctatgcaaagggcgtgagcatcaccgatcaggcaacaatcgacttcctgaaccagctgaatactatagacaggcctgtaaccgttgttttctatggcgatcatctgcctagtgcttatcagactgctgcggcgaacaaagacaatacgctggtattgcatcaaaccgattacttcatctggtcgaatcaggcatcagcatcggccggcgcgaagctcgacgccgagaacacagcatacacgtctcccaattacttcatggagatggcagccgaacgcatgacgccaaggtctcgccatatctcgcattccttactcagacacgaaccgatatccctgcactagaacgtctggtgattggcgcaggcggcttcgatacagacacatccacaacgtatctggatcagaacggcaacgcaatcaagcgcaaggcactgtccaagcaggccaagaacaccttgcacgactataagctcatccagtacgacatgactgccggaaagggatatctgaacgacaccaacttcttcacagtgaagtaatgccaaacaagaatggccatctgccgcgcattgtgcaggtggccattcttattggcgcctcgtttgtatactgacatatatggcacagactgcaattgatcacaaggttcaatgggaaacggtgaacagggtcgtttaccccgttaaagacgctgatttgacattgcccttgtatgcagtgaactggcatccttcccattttgatgcgaacgtgttcgatgaacgcgacagcatgatgagcgtcaatctgaatgctgtaagccgttcggattttcagtaatctcgtagctcatggaaataggccactggccgatgatccgcacggcttcactgtcgatgcacgtaccgtcatcacattggaaccgaacacgcatatctcgctatgcacctacttcaatgctttcccagcgggatattggcggcactggacgcgcgttaagcaactgcgttttcttgcggaggctacgggtaaggcgggaaaacactgccgaacccgcccggaaaatcaggagacgacggcccgacatcatcagaaccatccggcttggatcctccaactccaggctcgaggcgtccgacaacaggatcaaggtcaccatccgcatggcctatggcttccaccacgtcgacaacctcatcgccctcgtcatgctccgctgcggcggactcgacatacgcctaccccaaccaagaacctaacccacgaaaacagcagaagcctctaacatatttgcttatccaaggtatgagagatttgtggtacctgtggctggaaaaggataatgagggactccgaaaggatgcttaatggtacgggaggaaaaacggtatatcgattcaatcggcttgtcgtatgtggacggatactgattatgcgcttggggttggtgcgcgtattgagtgtgtggtcgaaccagctgaagatgagtgggggtgtcattgttgacgttcaagaaagcatggcagataccaggtaaatgatttacctaccttcatattttgcggtttgggctgacactaaaagatgggggtgcgactcacggttgcgcccccatcttttagtgcgtcgctgtcagtgcctcttgttgtatgcgattttgttggtgtcaatgacgaaggttttgcggtcattcttggccatgacatccaggataatgccggcgatgatgagcagaagaccagcgatgaccagcatcaccgcgccgatcagcgtggggaagtgggtgaccacgccggtcttggcgaattcgaaggtgacggtgccgcagagcacaatgccgacgatgccgatgattaggcccaatccgccgaagaaggggaggggcttgtattcgcgaatcatgcggaagatggtgctcatcaccttgatgccgtcgcctacggtgtccagcttggacactgagccttcggggcggtcgcggtactggattggcatctcgtagagtcgcaggttgttgttcagcgagtggatggtcatctccgtctcaacctcgaagcctcgcgagagcacgggataggtcttgacgaaggtaaagttaaatgcgcggtacccggtcatgatatcggtgacatgtgctccgaacagcccgttgatggagccgcgcaccaaacggttgccgaaattgtggaacggacgcttgttctcttggaaataagtggatgagaggcggtctccaatcaccatgtcgtagccttcgagcaccttggccaccatggcgggcgcggcgtcggccgggtaggtgtcgtcgccgtcggccatcacgtacacgtccgcgtcgatgtcttcgaacatggcgcggatgacgttgcccttgccctggcggggctccttgcgcacgatggcgccttcggctgcggcaatctcggcggtgcggtcggtggagttgttgtcatacacgtagaccgcagcacccggcaaggaagccttgaagtcacgaacaaccttgccgatggtgacctcctcgttgtaacagggaagaagcacggcaacagaaagattctgattctcaaactggtcagacatgaacacaactctacgcttcattattcttactgtttctcagcaatacagccagtgatgccgaagaacaatggaagaataaaagtcacgggcaatagataccaagcaaacaccagaggagaaagatacaatactaatacattgaaaccaagtaaagagcctgctcctacagcaatccatctctttctcgacataccataaattaacaataataatggaatatacgtcgcatagtaggcatatgcatttaatataggatttatggcaatttgttggcctgcatctgccgctcgcataagcaaggatgatttttgacctgttcctcgcatatcatggagcacattttccgcacttaagggcggacgcacaaaactgtcccattgaatcatatactgatcactaaataatccatctgaattagacccatagaagacacccacttgcgggtaaaaccaaccaagcataaggtttccgaaagccttaacatattcccccggattatggacaccaagtgagacccatgcgccaatacctttgatcttttgcgctatactcgcttcattattgatggtccatgaagtttcatcaatacgataattcgtgtatgttttaccagccttgtcgatattcagtaagctggataaggcactacgttcctgaggggaaatacgctcaggtgatatagactgtatacgcgccacgggcatcataattaggcccataacttctttccccggggaaacctcggcatgagtaactctcactagagcaggttcaatgatgccctgcgcaagcaccattgctataatcatgcttgcgaccaccttcaagcgattcttcttaacgcttgcaacgagaacacagaaggcacaaagaatggccacagtagcagttcgtttactcagcatgcataacgcaaccagaagtactagcataacgcaaacaggccgacgatggagcaccttcccacgcgtaaggaatatctcaacgtaaataattgatagcggtaggagaaaaactgtgtgtaacgaatctttcgccattgtaggaactgctcctacaatagccgggcagaaagcaaaaaagagaaaaatagccaacaaaagagaacgggcagcaccaatctttcgcaaatagcatagtactagcatcactccgatggcaaaagaaaaggtttgcaccaaaacataaatgcctagtcctaacaacacatgatgaagtgcaaaacctagctcccagaaaaaaccaaaaactaaagtgtcaaataacggatgttgagtatagtaaaaatgatagccagagctttgcataaactgcgcaattgtatcatccctcatgacaccaggccaacacgtgataacccaaggcaaccaacaaaatatcacaccaatgagacaaactaggccatatttctttatgctcgttgtaaatgatattgcatcttgcgtggctgcccaataatcaacactcatcacacgttgtctcagagggagcgaggctgaatcaccattttcaactcgcgaaccagttaaacaatcgaaccaatggaatattagatacgctattaaccaagacagtaagccgaatactgcagcatacgctaatgatcgttttgatccgccctgtgacccatcatccactgctcgcccaataagcacgagtaacataattatgaacgcaaatacccaaacagagatatttttattattgagacgaagtttcaattctcgtagcatctattccactttgtcttgagttcaaatattaattatcgaatcgtctacttgcgtcatagtcaatgcgcgatcactcaataatgcatagttccgatttcgctcatcttgaatgacgaatgtacaggcattctcatcaacagcaacaccaactgcatctgtttgctgatcatcattgggattaggaatgcgcaatgaagctatgagtcgaaattcaccgttattaaagatattcagtggaatatcaaaaaccgcaacatggtgaccgtggtctttcattttgaatgtcttcatcccagtatcgtatgaaataccaccacgacgaatatcatgcaatgcaatggctatataaaaatcatctggctcatcatactggtattcaacagcaaatcgaaatgtatctgacgacttgcaaatccgcggagagatggcatacgtacgtaaaatcgggcagcgttcattcagcccgttgggatatcctccacgctcttcgcgcttttgctgttccacagcctcctcagcattgagattcgccaacgtatattgctgagacacagtctccggatctccgatagcttcaacctcaccgtcggcaatcatcattgctcgagaacagtatttccttacggaatccatgtcatgggtcactaaaataactgtcttattagcatctttcttgatttccgtaaagaactcatcacatttacgctggaatgcctcatcaccaactgccagcacctcatcaagtacgagaatgtccccttgagccttaatagccacagagaaggccagccgtacctgcatgcccgaagaatagttcttcagcttttggtccatgaagtcttcgagctcagcgaatgacacgatatcgtcatacatcgcatcaacttcttctgcggtgaaacccaagagactgccgttcagatatacgttttcacgaccagtcaattcaggattaaacccaacacccagttcgatgaatggcaccagctttcctttgacgctgatgctgccctgattcggatagtagatttgggaaataatcttcagtaatgtggacttaccgccaccattacgtcccacaataccaaagaactcaccctgatgaacttcaaaagagatatctttcaaaacctgttgctgacgatagcccttgataccttttgtccaattgatgaatgcttgtttaagacctgtggcctgttccgtaggcaacttaaaatgcttagaaacatgattcgcagccaatacaactggagccttggtgtaatcgacttttggttcttgcttttctcccgattcggtcatctcacatcacctccgcaaactggcggctgttacgccggaacagatatacacctagccacaacataaacactgtaaacacaacggggaaccattgaatcaggggattatggaactggttccagatcgtaggctgtgtttctggagcaatcagattatggcgaatgtcctgaatggactgagcaaagggattgacgagctccaatcgagccaaatcagcaagtagaccgccttgtgaagtgacgtaactgagcgggtagataatcggcataccgtaaaagatgagctgttgcagaacatcccagatatgggcgatatcgcggtaatacacgtacattgtcgacatgattagcgtgattgcgagagcaatcgcgtacaactcaataatgttgagtgggagcaacaatacacgccatgtgaactgtacatgcaagatcagagcgaacagcaaaactacaccaaggttgatgatgtagctaatgaaagcacccatcgtggcggatacaacaacaatgtaattagggaaatgtatcttcctcaacagatcgccacgatcgaccactgaacgaagccccacatttgtggattcagtcacgaactgccaagagctgatgccgagcagcagcacaaccggataagtgggcgtaccatctgacatcctcaagaattttgcgaacaccaaatacataacgcaaaacatcatcaacggcttaagcaccgaccatgcgataccgaggaaagacccctgatagcgcaatctgaaatcggtcttcaccagtccgcgcaacacgacccacgcatactggtaacgcgccctaatactgtccaatacattcttcacagcacataatcgtatcagtcagacggaatctacttacttgtagctgttcaatcttcacaggcatcccttcgcggcagagctttgcggaattttgcagatcttcgaggccgccgaaaacaatagagagacgcgccgtcattgttgtagtccacatatatagacagtattactattttactagtcggtttcccttttcccagataggaatggtatgtccttcctcaacacgattgcaaagcaccttcccgcttccaaacgcgccgttgcgcagactcttaatgaagtcaagatgcttcgcgaacatgtagatgtattgtacgggcagctctatgcccgaatagaacaagccgattatggtatcaacgacaatttgaactacaaggtcgacaccattctcacgccgcatctcaatgatttgggaacagcactagacgcgcatgatgcgcacatgaaaatatttgcatgggaaaactatcggcacaagggagaatctctctcagcggctaagcagcgctttttcatgtcgctaccacccgccacgggaagcactcgactattgcaggaaggttgcgcacagcttatgacagagttcgaccaactctgtcgagacaacaaccttccatactggcttgatttcggttcattacttggagctgtccgccatcacggatttatcccgtgggacgatgacaccgatcttggcatgatgagagaagatattgatcgtctacaaggtattgttcaacatgattctcgatatcgactatctctggtctatgacgcaatcgctttttgtcggcaaattcgtttcatgtcttcggatacatcaaacccatgttttgtggatattttcatttacgattacactgactccaccgctatagaagtgtacgaccgacgtcaacatattcgtaccgaattacttgatgccctcagacaatctcaattccgggcatggcatgaccttgtgtatcttagcgagacctccgatggagcagcagaaattcagcaggtcttttctcgctatcagagggaaatggaagaaagcggcatcgtggtgtcgaaggagaatgcttccggcatcatgtacggcatcgataatgtcgacaactcatctgttcgtctgtacaaacttgatgacatgttccccacaacatgtctgacgtttgaagaccacgagtatcaagcacctcatactccaatgaccgtactcacccgtaactacggtgatatttattcgttgcctcgtgatatcaacagtcatttcatacatgttgatcctgcactattacagcaggacaacgtacaggaatcgatccaagactctctatcagaaatcccaattagcaagaatgaggaataatcatgcgccgagtaatcacttacggaacctttgatcttcttcactacggacatatcaatctgttgaaacgagccaaagcctatggcgactacctaatcgttggtctttccacagatgagtttaatgccggtaaaggaaagaaggcatacttctcatacgatcagcgaaaagaattactcgagtcactgcgttacgtcgacttagtcattcccgaacaaacatgggaacaaaaaaggaatgatatcctgctatatcaggtggatacattcgtaatgggctcggattgggccgggaaatttgatgatcttagcgacatttgcgatgtaatctatctgccgcgtacacccgagattagttccagcaaaatcaaaaacgatcttgagcatagaaattagatgaactgggggtggtgccgttttcttggactatgatccgaggaggaaacggccatggcgaagtacagcaaggagcagcgtcggtgtgcggttgagttgtatgtgcggtacgagtgctgcgctgcggatatggtccgtgagctgggttatcccagtcgggaggcgtcgcgcatgtggcatcgcgactggctcgaggagcagaggacgggcgtgccgtcgacgcgcggggagcggtatgcgcgctacacgacggagcagaagcgcgccgcggtggaccattacctgacgcacgggcggcgcgcgagccgcacgatgcgccggttggggtatccgagcaaggaggtgctggccgcgtggatcgacgagctcgcgcccggcgaacgccatgtcaggcgcggccccggtccccgacgggctcaaacgccagggtcaacccccgcaaccgcgactgggctgccgacgccctgaaggccgtgttctccatggaatcgagggacaaggcgctggagaatgcggaattcgtcgccaaggacatggaatcgaggaagctgagggaggccgccaaatgcctcagggagggcatcggcgagacgacgacctacctgctcgacgactatcccagggagcatcgccggcgcatccgcacgaacaacatgatcgaacgtctcaaccgtgagatcagacggcgcacgcgcgtggtcggcagcttccccgacggacgcagcgcgttgatgcgcgtctgcgcgcgctatgtcacgtcgaacgagtggtcgactcgccgctacctcgacatgtcaaggctcggtgagaccgtacgggaagcgaactgatcatcgccacagggacgggcgaagaccaaagtgcgcaaaacttcggcctaccaaatgaaaacgccgaagcggcctacttcaacttgacacacatacgaacatggcgcggatgatgttgcccttgccctagcgtaggttccctgtgcgcgattgtgcccccgtccttggccttggcgattttggcggtacgttccgtggagtgtcgtacatgcaggggcagcgtccggcagggagaccactgaaccctcgcaccaccttgccgatgatgacctcctcgttgtatcagggacgaaccaacagaagaattcagattcgcaaatggcgcaatgattaatactgtgactgtcctgtgtaatgatgaggagtctgaataaataatttgctgtttgtgaagagtgacatctgggtggttggagtgtcctagacgtcgcacatcacaaacagcaaacaacgaaatgctgcaaagatgtatgtgttatctcaattatttcattccaaggtactgtttccaatactggatagaagtcagttctttactagcggccttgtattcagctgacagacgctcgcgattcttcttgaagtaggctaaatcgcgtttgtaccgctttgtgaccgcattgtactgtttgaggttcttagtacggatagttcctctgcggttgaaccaatcgatggcaataatgatattctcaccatgaatactgcctgcggggtaaatccacccagcgctcgaaatcagggcataacgcttaccgggagttcccttagccccatggatactggaatgcagaagacgctggccgttgatggtaagaaaatcaaaagcgcgctgttgaatcgaacgcggtttgtcattgtctatttcctgacgtgtcagcttggatacgtcaaaaccttccagtcccatatcgtcggccatctgctgcagctcggggaaggacactagtttttccttctcttgatttgcttgtacgaacttctcttggacgataggctgtttaatgaaatcaggtcctttgaggaagtcctcgaagcccttgagcgcaagctccgcatccgtgtagttgaactttttgagttccaaatcaacttgatcgtgcaactcgcgtaggaacgtatcgatactgggtgccagtcccgtcgtcatctgggcaatcatgccattacggatactttgataacgttccacagcagcgttgtagcgaatctcaaacttggaatgccaaatacacaagccgttcattgtcatgaacgtggggttgcaacgaattccgtattctacatcgtcgtagcggacgaaaactggtagtggcataccattgcgtttgataacactcatgggaatgcagcaataccaccaggctgcgtagcgccggccatcgccgactcgtaagttttcgtcgtatacttcattgaacacaatgtcaacgaacttcgtgacctgcagcggaattttagcggccacgcaaataccaatctgcggatctatgaagccggtatcttccttcatgtcctgcacgtcctcgtaattcagcatagcaccgctaacaaacgcttctgaatactcgggtttgacgatgcggagtagattgtacgtgcgcatgatgctctcaggagagacttcaacgtcatcgtccattagcaacacgtgggtcgcgggaacgtcctgttccatggactcaatcatgccacgtgcgaagcccccagcaccgcccacgttctcattaggggagatagtcaccttgtcggtgctaagttctttgtaggggagagtacagccgttgtctatgacgtgcatgcggaaatgtttggcgatatcgttgtcggaaccaagaatctctttcttcactagttcgatattcttggtaatgtaggattccttcttgaaggtggtggtcgagagggaaagttcgatatccgtcagttcgccatcgatgtctagcgtgtagtaggcatcgcggacaacaatggcgccggtggtttcgatttggaatcccgcgagaaccatgttctcgtcgactgtgagatcgagattgatggactgccatttattgctggcctggaccttggcaaaaaccgtgggatcgatttcaggggatgaagaaagtcgataggctttggtttgcgttatagtgcaggcattccccttgacctcaagatgcaggtggaaacctgtcgcacgagtatatttgagcagcttcattgtagataggctgttgaaatatgttgtgaaatcaatggtgcccgcaccctcgacgaaccactcgtgtgtgtctggattgacgcgtacaggttgattggtgtggtagtacatcgtcgggtagctgagcgctcttggagttatctccatgagcacattcgcgaaacgtattgatggcatgtgcccttacctcgcttacacggaaaacatctgaacaatgtaataataactaggtctgtgcgaccttttggtagggggctgcatatatttgcaaattacgacacgtggaaaggatagcttatgtaactgagcgagccaggaccttcaataggtcatgaggggatggactattcgaggcagttatccaatcctatgctggtgcatgtcttaaacaggccatggtgaaaaatatcaagaaacttcacagcaggggcacagatcgagacgcggttgcaaagcatacggatatgggggatctgagttcagaatgacccgtgggtgcaatctcggtgcaaagctagacgaggttcatgcccattaccgtgtttggtaggtcccgatggtcgaggccaggtcgccggttccggtatgactctctcgtcctgtcgtcgatgatccgggggggggggtgttgtcgccgggaatggggacgcccgatgaccgctgataggaaccaggccggctacacggacgcttcaggggcgcatggcgtacaaggggcggaacatggtcgaacgcgtcttcaaccgcatgaagcactaccgtagggccgccacccgccacgacaggctcgacgagacttccctccccaacctccagctcatcctcatcgccatctacctgaaaaaacacagccaaaaacccaactagtgcaaacacaccctagttaacataaatcttccctcatccttgaaagcctcaatctccgttggtcacgattataggcatatcttgcagaccagcccagaagctagagttgtgttcatgtctgaccagtttgagaatcagaatctttctgttgccgtgcttcttccctgttacaacgaggaggtcaccatcggcaaggttgttcgtgacttcaaggcttccttgccggatgcgaccatctacgtgtacgacaacaactccacggaccgcaccgccgagatcgccgaggccgaaggcgcgatcgtccgcagggagccgcgccagggcaagggcaacgtcatccgcgccatgttcgaggacatcgacgcggacgtatacgtcatggcagatggcgacgacacctacccggccgacgccgcgcccgccatggtcgccaaggtgctcgaaggctatgatatggtcatcggcgaccgcctctcctccacatacttccaggagaacaagcgcccgttccacaatttcggcaaccgtttggtgcgcggctccatcaacgggctgttcggcgcgcacgtcaccgacatcatgaccgggtaccgcgcgttcaacttcaccttcgtcaagacctatcccgtgctctcgcgaggcttcgaggttgagacggagatgaccatccactcgctgaacaacaacctgcgtctgttcgaaatgcccatccagtaccgcgacaggccggaaggttccgtatccaagctggacacggtaggcgacggcatcaaggtgatgagcaccatcttccgcatgattcgcgaatacaagcccctccccttcttcggcggattgggcctaatcatcggcatcgtcggcattgtgctctgcggcaccgtcaccttcgaattcgccaagaccggcgtggtcacccacttccccacgctgatcggcgcggtgatgctggtcatcacggggctcctgctcatcatcgccggcatcatcctggacgtcatggccaagaacgaccgcaagaccttcgtcatcgacaccaacaaaatcgcatacaacaagaggcactaaggtcattcttatgtttacagcacagcgagaaacaatttggcgtgtagtgtttccttcgaacaacgttggcatggatgaggagtttcgtattgccgctgctcccatatacggcagcggatatgatgcttctgggggctccttgagcaacgccgaactgcataaggagattactggtcgtacgtcattagaggttcccccagagcacacgtattccactgcaagctactacaacgcgtttccggccgcttactgggctcaatggactaatgtgcagcaagtcgtgctcaatctcaccgttgctggtgagggctcggtcacggtgcatcgatcggatgcggatgccaacgattatattgtggctaagaaatcggtgaacgctactgccacaagccctcaagttgtgcagattccagtgccgatttatggtatggctaagggcggctggctgtggtttgacatcgaggcatctgctgatgcttccgtgacgttgtccgatgcgagttggcagactgaagtttcggcaaagcgcaatctgactgcatctctcgccatcaccacgatgaacaagccggagtggtgcatacgccagttcaatcttctggcggatatggcggatatgaatcttatcgacgcagtatatgtggttgatcaaggttcaaatttagtggaggaacacgaaggattcgcggcggcgaaggtcaaacttggagacaagctgcgaatcattcagcagggcaatgttggtggatcaggtggctttgctcgaggcatgtacgaggttgagcatcacggggaaagcggatacgccttgctgctcgatgacgacactgttctggaaccggaatccgtatctcgtgccattgcttttgccaaccattgcgagaaacctacactggtaggtggcaatatgttgttcctgagtgagccaaccagaatttgcgcattggctgaggtcttcgatcctcagaccattagttggggcactgcagtgaaagagtctcggtatgatgatttggcttcaacgtcattcttggataagcagtacctgcatcggcgcgtggatgccgactataacgcttggtggatgtgcctgatccccactgaggtgattcgcaagattggcctctcgtatccgttcttcatcaagaacgatgatgtggaatacggtgtgcgtgcccagcgagctggataccgcacggttactgtgccaggtgtgtgcctatggcatcagtcctttgtggataaggatgaccaactggattggcaggcatactaccacattcgcaaccgaactatcatggggcttctctacgcgaaccagcagtataagcgcaacatattgaaagagatggtgcgcttcaccttatccgccaccgccaagatgcggtattcggcagtggctcttcaccaggcagctatgagagatgttatagccggacctgagcatgtgggaaccatattggagacgaagctcccagagattcgcgagattcgcagcggattcgccgattcaaatatggtacctgtagaggatttgccggatacgttacgtgcccaggatgagaaattcgctcacctacacgatctttcgcgtgcagaggccattctcggcatcggtttgcaccagattatgccacctcgagcaaatcgaagtgctgtaatcgatggatacatggaacccaccaaggtgcattgtcttattgacaacggccatagtactcatactgtgcctgcagaccagttggattcattggtgctggttgcagacgacgcttccgatcattggcgcgcgctggggcttatggactccgctgtattcgtggatcccgatcgccgcaagggaatcctgcttacacggcagcccgtgcgtgctatcactggattcatccgtgcctgtggattgtatgtcaaagtcattgcaaattggcgcacataccaacgtcagtaccgcaaggcatttgccaccatggtgtctcccgaatggtggcaacgatacttcactaagtgatgtaggcaatattgtttatggggtgtatacgcattcggcgtatacaccccataaacatcatttaggttattgacctttcagcgcagtataactgtggctaggcgtcccggaagatatgctcccatgtctccatggatgcaatgccgtattcgcgatactcacgggacaaccgtttccagtttttcatgagcttgcaggtcaggcggaaacactgcagcatattgcgccgatacaacttgctgtctcgccggaaccaggacaccgaatcgccgtcaggcgtggtgacaatcgctgaattcacaccgaggaaagccggccagatggagaaccttgccggaatggaaacttggggagacttgtcgctttttccagtcccacgagagcgtagcgctttcagtactgcctgcatacccatcttagtgacggtgcttgcgggtcgcggtgcccaattgcgttggaaatgatcggcaggttcggggagttccaatgggtcggcataggtagtgctgtcatcgaagccttcgcgagccttccggacttcgttgagcttggtaggaagcgagtcaatgaggtggcttgggccaagcagtacatcagagagggccatatgattaagtttcatgcctgaatacagcaagcgcatacctagatgcgcctcttcgtacagcatgcggaaagcactgtgtttcgcggcgttggggaaatgcagtaaagcacaaatccaacgattacgttgcgtgaaatactcttcccagccgcgcgcagggtctttatcgtgccagcccatgtgccatacggccacaccaggcaggctgattgttggaacaccatgctccttggcgcgcaaaccatattcgatatcatcgaacttaatgaacaccggcaagccgagtccaatagtacgaatggtctctgtggggataaggcagaaccaccatccattgaaatccgagaattgcatgctgtgcagcgatgggctatccgctaatggttcggaacggaagtcatggttgaattccgcgccacgagatgggtacatccacattgaagatgcatcgaagcgttctccctgcacgtgcagaacagtacgatgatcgatatggaacatacctccaccaacaagggcggagcgcacagtgtaatcggcgaaatgcacagcgcgaagaatcgattccggctcgctgatcgcatcgtcatccagcaagagcgtgtagtcgcttttcccggccttgacagtttcaaacatgcctcgtgagaagcctccggaaccacctagatttgcttggcgcaagtaggtgagctggctgcccaactgattcgaaacttcgctatagcccgcttggtcgcgcacaagatttgtgccttgatcggtgcagtagacggtgtcgagctgttcgcgcagttccggctcgttggcgatggtccggagctgatccaagcaatatgaagggcggttaaatgtggtaatggcgatggacacacgtccggtgtgcttggtgcgtcggtcggtggttggcacttgccattgggcattggaaacagtaagcgccgcatctttggcagcacgggcatcaaaccagtaatagccaccatccagcatcccctttagcgtgagcgtggcttcaatgcgttccgctgtcttggaatcaatgctgccgatagtgaaggtttgcactggagaagataatccacgtgcagtggaacggaatagggttagagtgcccttgcctgtagcttccgcaagaaagcgcagctgcttaacgcaggtccagtgccgccaatatcccgcgggaaaagcgttaaagtacgtgcataacgagatatgcgtatctggttccaaagtgatggagcttcgcgtatcgacggtaaaaccatgcggatcatcgggtaatgatctgtttccacgagctacgagattgctgaaatcagaacggctaatggcattcaggttgacgctcgtcatgctgtcacgttcatcgaacacactggcatcaaaatgtgagggattccagttcactgcatacaggggcaatgtcaaatcagcgtctttaacggggtaaacgaccctgttcactgtttcccattgaaccttgtgatcaattgcagtctgtgccatatatgtcagtatacaaacgaggcgccaataagaatggccacctgtacaatgcgcggcagatggccattcttgtttggcattacttcactgtgaagaagttggtgtcgttcagatatccctttccggcagtcatgtcgtactggatgagcttatagtcgtgcaaggtgttcttggcctgcttggacagtgccttgcgcttgattgcgttgccgttctgatccagatacgttgtggatgtgtctgtatcgaagccgcctgcgccaatcaccagacgttctagtgcagggatatcggttcgtgtctgagtaaggaatgcgagatatggcgagaccttggcgtcatgcgttcggctgccatctccatgaagtaattgggagacgtgtatgctgtgttctcggcgtcgagcttcgcgccggccgatgctgatgcctgattcgaccagatgaagtaatcggtttgatgcaataccagcgtattgtctttgttcgccgcagcagtctgataagcactaggcagatgatcgccatagaaaacaacggttacaggcctgtctatagtattcagctggttcaggaagtcaattgttgcctgatcggtgatgctcacacccttggcataggtgttgatttgtccgcgttcgtaatcgttcaggttttctgtagtgtcggcccagtcgaactgattattggagtaccagttgtcgtaagtcatgtgattctgcatggtgacgagctgcaggaactgagggtgttcctctttgttcagttggtcgatgatgttctggtaggaagccgcatcgctgacgtacggcgaattgtcgattcggtcttggttcgtgattgccggcttgctgtccagcgtgtagaacttgccgaatccgaacttcttgtagttggagtcgcgcaaatacatgttcttgtaatacggatggaatgctacggaaccggatttaccatattccgtgttccagatttggttccatgcgaagggattctggggcctggatacctcttacctgttcaccaccgccctgcagttgcagtctccttggaaggtcgagtccgtggatttcagggatgcgggggacggcaggcaggagctgcgcatcgcgatcggtttcgaggcgggctcgcgcttctgttgtcccgagccggggtgcgacgagaccgtctgcccggtgcatgacacccgtgagcgcacgtggcggcatccggacttcttccggtacaaggcgttcatccacgccggtgtgccgcgggtctcctgtcccgtgcatggggtgaggacggttcccgtcccgtgggcgaggccgggtggcgggttcacgctcctgttcgaggcgtgggcggtggaggtggcccgccaccttcccgccggcacgttcgccgagcaggtcgacgagaccgacacccgcctgtggcggtccgtcgcccactacgtcgacgaggcgaggaggctggaggactacacgggagtggaggccgtcggcatcgacgggaccggccgcaagggacacggctacatcaccgtggtcgccgacctcgtcgagcacgacgtgaccgacgtgacccccggcaaggacccggccacggtcgaacggttcgcgcgggatttcatgggccacaacggggtcccggagtatgtgcggctcgtcagctgcgacatgagtctgggcttccggaagggcatccgcgaatgcctgcccaacgtgaggcggatcgtcgacaagttccatgtggctaggcacgccaacgaggccgtcgacaaggccgggaagacggagggacgctccaacccactactcaaacggaccaagtacctgtggctcaggaacgaggaaagcctggccgaactgcagctggagaccaaacgcaacctcacgaggcaacggctcagaaccggccgcgcctgccggatgcgcgaggtcccgcaggatgtctacgcggacagccccaccccgtccgaggcgtgggtgcgcctgcaccgcctgtgctcgagtgtatttcgtcaagtcggtgtttcgtgtttagtcatgtatttttttcgggtttaggcagttgcatgcattttccttatttttccggttgcgcggaggtgttcctgccgaacatgagggcctcactgacgcggcggctctggccggtgaactcgaggagccgcccgtggtgcacgatgcggtcgatgatcgctgcggcgagtttgtcgtccgcgaagaccgtgccccatttactgaactcgatgttcgtggtgaatatgatgctccgtctttcgtagctgcccgcgatgatccggtagagcaggcgcgccccgtcgatgtcgaagggtacgtagccgaactcgtccagtatgatcaggtcggcacggccgatgtcccggagcatcgtctcgagcgtgccgtcgcgtttggccttgcccagctggaggacgagctcggcggtctgatggaaccgcacgcccagccccatgtcgatcgccttcatgcccagcccgatcgcgagatgtgtctttccgcgcccggtcttgccgtagaacaccaggtcctgcgcgcgcgggatgaaaccgagccctaggagctcatcgagcatgtagccgtcggggagcctgacgttcgtgaagtcgtagccgtcgagacccttgacgacggggaaccgggcgcggcgcaggagcctgtcgtgcttcgcgcgttccctgttcgccagttccgtgtcgagcaggcggtggacggcgtcgacctggcggggcgtggcccagccggcgaattcgtcgatgctcgccttggagatgaacagcttgcgggccttctcgtagagcccttcgtccgtcttcgtgttcatcgcccgccttcctgcacgccgacgtccgcggtgaacgcgatgtcgtattcacccggatccggcctgtcatcgtcgtattcgatacccgccacgccctcggcgagcctggccgcgagcagtgtgacaccggcgcggtccgccccgccggtcgattcgaggatggaaagcatcgcctcgaccgcgttcgcccacccggattccctgtcaacgcgtttgagggtctgcagcgcctcgttgcgtgtctgtctgtcctgccgatccagccattcccgcaacgggtccggcaacgcgtcacgtacccggctgttgggccaggacgcgggcttgttgcacagcagcgccaactgcatggacgggtcctcgctgttcgtgctggcctggccgtacgcccgaggatgggtcgccagatgcttgcccgacgagtcgaggacctcgacctcgagcgcgcggaggcccacgatcacccctctgcccgcgttcgcccggtccgcggaacagcgatgccgtccccgggcgcggccacgccgtaccggtcggccttcatatgccgccacgtgaccacgtcgaaacgcttcccgggcaacggcagcagcgccgcacggtcctcggagaacaggccacgttcctccgtgtccttgcggtaatgcggtttcgtggccagctccaggcaccggtccggcagcccggcgctgaagttctccaggctccatacgctcggccggggcacgaacagcttgcgccgcaccatgccgaccttggactccaccgcgcccttctcatgaccggaatacgggttgcagaacgaacaatcgaacccgtaatgcgcctggaaggcctggaacaggtgcgtcaggcgcggctcgcgctccccgtaccccttatggcccacgccggcggcgttatcgaacacgatccgctccggcacaccgcccagccactcgaacaggttgcgcaacgccaggcacgtgcactcagcgttctcgcccggcatcaactgcaccagaccgacgttcgaatacgggaaatcaagcacgaaatgatgcatccgctgcaccacgccgcgcaacagcacgtcgacctcgccgaaatcggcctgcgcctcgcctggatgccataccagatccatgaacgcctcatcacgctccgccgcgaactcacgcctgagccgcgccaccgcccgcgtcaccgtggacagggagacctccgcgccatgctcgtccctcaaccgctcccagatcctggtcgcggtatgccgctgcttgcgccagttcgcgcgatcctccgcgagccactgctcgatcacgggcagatacgggtcgatcaccgacgcgcgcggctttctcaccgacggcacggccgacagatcctccttcgcgaggtacttacgcaccgtcggctcgctgacatgtgttttccgcgcgatcgacgcgacggattccccgttccgccgcaaacgacggatagactgtacttggggcatgctgatcataatcctttccggtcctttctggcggagatacaagcaccatccagttaagaccattccgtggtcggcatgctctgcctaaacccgaaaaatcatcgtgactaaacccgcaacaactaattgaacacaaacagcgagatgggtcttgccggtgccgacgggcccgtagagcacgaggtcctcgcaacggtctatgaagtcgagcgtctcgagctgcgcgcgtccccagtcggcgggcatgcgcaggttggaccagtcgtgtccctcgatgtccttcgcgttcgggaatcccgcggccttgaggagccggacccgtttcgaccgctccctggaggcgatctccgcgtcgagccagctttccatcaggtccagctggacgggcgtcgcccgctcgatggcctcggcgagcacgtcccgggtcaacggcagccgtctggccgtctccatgatcctctcgcatctggcgatggtgtcggccctgcgtctgcgtgccgtgttccgtccggtcgcgtcgttcatcgttccgtctcctttccgccgttcccggtgatgaaccggtcgtatccggccaggtcgggcccgtcgtcggtgatggcgccggcatcggcgtcgcgtgcgcgcagggcgagggtgacgagcgtggattcgtccaatgccgaacccggcccgtcgactatcgcccggctcgcggccgcgaccgcgttgccgaaaccggcggccgcgcatgccgcgcctatcgatctgaggctctgcgcgaggcgtttggaatcggcctcgtcgagccatgcgcgcacgtcctcgggggaatcggggcgtatcgacgattccctccaggatccgggtttggccgcgagcacgggcatggccagttccgggtcctgcagcgtggactggctccgtccgtatacccgggggtaccgcgcgacgatctccccggtaccgggatcggtgatccgcacgctgtcccagcggatgtcggccagcgcatcgcatctgtcgggcatgatccgtccgagctgcgcgtgggtctcggcctccagcggcgggaccatgaggttgcggcggaggaacccgaccgcgttctccaccgcgcctttctccccaaccggaataggggttgcagaacctcgcgtcgatgcggtggtgcgcgaggaacgcgtcgaacaccgcggcgggcgtcacctcgcccctcgcgttcctgcgtcccgcgccggtggcgttgtccatgacgatcacgggagggacgccgccgatgtgctcgaacacctcgaccagcccgtggcacaggcgttccgcgttctccccgggcaggctcgtcacgtaccgcatgttcgaatgggggaacgtgacgaccaggcagtggtcgtccacgagctcgccggcgatgcgggccttcgccacaccgaaattgatctgcgcgacgccgggcgcccagacgagctcgccgtacccgtcggaaccgctccggttcgcctcgcgccagcgtctcacgtacctcagcgtcgtcgtgtactcgccgtcgtagccggtctccgcgcggagcctgtcgtgcacgcgtttggcggtacggcgctgcttgcgcggcagcatgcggtcggcctcgagccattcgtcgaccaatgccgcgtacgggtcgatcttggagccccggcgcctgtccatgggcggtttcggggtcatgtcgtccatatcagcgtatttcgcgaccgtggcgcggtccacgtccggtctcctcgcgatctccgacctggacactccctgacggtccagtctcctgatatcttgctgtttgggcatcggtatcgccatcgtcctttccttcccgagcgccgccggctgcaaccggtggattcgttttctggttacgtctcgggaatatacaggcacggcggaccggtgcctgttctcgtctgggcggtcatacggtgcagttcctgctggaaaccggcagcccatactgcggaaaaatagtgcagaaattgcttaagaaaaattgaagcaaaacagatgctcctgttcgtcaggtcgatgagcaggcacgcgtacacccacttgccgccgacacgcacgtacgtcaggtcactggccaggtgggtgcgcggctcgtagccgtcgaactcgcggtcgaggatgttcgcgagcctggcctcgttaacccgcgtcttgtgtggtttgaacgttctgcgcgcgtacgcgctcgtcatgccccgccgtttcatgatgttgacgatgcgccttctggaggcggtgacgcccctccgctccagcgcggccttgatcttcctggcgccgtaacgctcatggctgtcgcgccagatcgcgtgcacgtcgccggcgatcgggtccacccgccctgcttcgggatgttcgatcatccagtagtaggtggagcggggaacgcccagtattctgcactgcgccgatatcggataacgggaggcgttggcccgtatcactgctactttcgtgcgaatatcagcgccgcctgttctgaaacgtccacctccatctccaactgtctgttgcgcttgcgcagctcgatcagctcgttctgctcaggggtgcggttgtcggcggctttcgtggagccgctgttgcggatgccctggacccaacggtgcagcgtggaatgcgagatgtcgtactcgtccttgatctcgcgcgccggcttgccgttctcgtaaagctgcacgatctgccgcttgaacgactcctcgtagtggcggggatgcttcgggtcggccatcgtcggcctccaatctcatgtcattcgtccctcatcggactgtctaatacattgtagccaatccactgtgtccgccaactgggtcgcgaacgcggtgctggcgttgccgcaacgcaattccatgagctccgggcaagaacccgtccgaatcgctcgtcgagcttgttcacgagccattcgtcgatcgtgagcaaagttatacgtggtatttagtcaagtcggcgtttcgtatttagtcacgaaacaccgacttgactaaatacaatctagctatcgcccagccagacaggccctggttgttcaagcgaagcacatctcgccttggccttgattttccttaccatgttggcatccccctttcactacacgtgtctcgcttagtgaaaggagcctaacaaccagtggccttgatgctcaataacggcggccaatcgtcaaggtcttcttcggcaataacgatggctccaaaacgagcaaatattcacctaatttcaatagctatcaagttgcattcttttctgaaagaaagtattttttaccgatttaccaattcttggatttgagccatattactctcaaaagtatttgaacacttcaatgaggaaaatggaacagtttcacgcaaagatagaataagccgattatctttaatgcaaagtcccgaaggtgaaagtttcagattttctggaaggaaaggcatgaaaggtctccagcgtccaggataagaacccctataaggacgattccactgaatctcttttgccttgtcaggggataatctttctgcggcgatacgtgaaacagtgtaccactcaaactcatgctcgactcgttctgaaacctctagactattttcaagttcagcacctattgaaattaaataattattcttttcctcagataaaggctcataagaataatctttaaaagacctaagtccatcgccaatgcagatacgaaaactatgctcgagtatgttctcattcacttgaagcatctgttcgtcattaagctttccacgtctaaagcaaacaacccaagatgcacttcggttcccttgcatatcattaatttctcgataattagctatacaatgcttcttttttggcttaattaaaataactaattttggatcaagtggtacaatccaacatcttttgccatgatccgacgctggacaaaatcccatatcactttgaatgaactgccctcttgggcttgcctcatataaggtccattcggcaccaagaacgatggccaagatcctttgcaagtgtatgattcgagaaaaaaccgtattatctgtcaaaatcgtatttttatcccgcagataacgtattacgtcgatattttcttgccgttcaccatagtcaagtcccctcatgaataatccagaggcataaggaacaagaacatgaacaaaataatccaaatcaatcaaatcagctcccttcacaagggcgtcgattatctcggtaagaccttcttcataatcccattgatctgttgttgattgaggttccaaaccatacatcttggctgtctgaggattaatgtcatacagccctttcttgaaacaaattgccccagctttattcactgaaagtccaatttgaccgcgtctccgaatgataatttcattctcccgaacacgcttctttgcctttgattgagaatctctaaatcgcccaagtactgcagccggaatccaatgttgcttcgtgccataggtattcatatgccttcaattcaaacggataatatgttctattaattgtagtgagggagagaagaaatccaagaaaaactcgggacgacaactgaccatctgcacaaggcatgacctattgcagttcaagacccgcagaagaggatcatggggcgcatccgatccgtgactgcgaacgaatgatccacgtgtcgctacgacgcaatccgactcaacaactgtctcgtggaaactagttattatgccacggacggccataataagcgcacaacaatccaagcactaccgatttcgtccacttagaatctcactcgaaaggttaaataaccaaatctctgctgaccgatgcacgtccacgtccgatgtgagtgatgaaactccgttaacgagagatccgtgcaaccgacgaatgagttgcatggatctctcgttcagatgacaaatgatgcaatgtttttaacactgcatcaagtcagttcttctgattcggcactagcatgatttcgccgtctgctatgcctttgagatgccgcccgtacggactcttgccatagcgttccgcggactccatgagctggtcgcgcgtaatccagccgttctcgtaggcgatctcctccacgatcgcgatcggcagaccctgcgcacgctgcacggtgcgcacgaactcccccgcctcgaacagagagtccatcgtgcccgtgtccagccacgcgtagccacgccccaacgtacgcacgttcagcctgcccgcgtccaggtacatgcggttcagatccgtgatctccagctcgccacgcggactcggcttcacctgcttggcgtactcgaccacgtgctcgtcgtagaagtacaggccggtcaccgcgtaatgcgacttcggcttcgagggcttctcctcgatggacacggccttcctgtcctcgtcgaactcgaccacgccgtaccgttccggatcgtccacgtagtagccgaacacgctcgcaccctcgccggactctgccttcgcgaccgcgccgcgcagggtcgcgcccaggccgttgccgtagaagatgttgtcgcccagcaccagcgtgcatggctcgcccgcgatgaactcctcgcccagcaggaacgcctgcgcgagcccgtccggggacggctgcaccttgtacgagaagcgcacgccgtaatgcgagccgtcacccaggagccgttcgaagttcggcaggtccttcggcgtgctgataatcaggatgtcgcggatgcccgccatcatcaggacgctcaggggatagtagatcatcggcttgtcgtacaccgggagcagctgcttcgacgtgaccgtggtcaacgggtacagcctcgtacccgagccaccagcaagaataatgcccttcattatgaaagattcccttctctgcggtttataaaaacctaattacacaagtctcgggcggtttcgctgaggaaaccgcccgagacaaatctgctacttcttgagttccttggtgacgtatgccttcagggactcctcccaatcaggcacgtccaggcccgtggcctcgatcttggccaggtccagcgcggaatacgtcggacgagggctcaccggcgccttcgcgttcgcgaaatactccgcggtcgagatcggcttgaccttcccaccgttgccgttcgtcagatcgaataccgtgcgcgcgatgtccgcccaactcttcacagtcccggaaccggtcaggtcgtacgtgccgtacgccgcgccgccgtcgaacaggtggaagatcgcctcggccatgtccttggtgaacgtgaggcggccgtactggtcgtccaccaccgtcacctccggcaattcgcccttcgcgaccctgtcggacaggcccatcatggtcttcacgaagttatggccctcaccgatcacccagctcgaacgcaggatgtaatggcgcggacagttcgcgaccgcgatgtcgcccgcggccttcgactgcccgtacacgcccaacggcgcgaacgcctcctcctcgtcatgcaattcggcggtcccgtcgaacacgtaatcgctcgacacgtgcaccagggtgatgttgtgctcgcgggcgactttggcgagcagggcagggccctgtgcgttcgccttccacgccagcacgcgcccctccggggtctccgccttgtcgaccgcggtgtacgcgcccgcgttgatgaccgtgccgtacagcgaccagtcgaaccggtcgtactgggccgggtcggagaagtcgaacgtgtcgatgtcgtggaactcgaaaccctccaaaccatgcgcgtccacgtaggcgcggatcgcgcggccgagctggccgttgcagccggtgaccatcgtgcggcgcggggccatgggcttggcgtccctgagcatcggatggtgcaggtccgcttcggagcgttcggagtcctccagcgggatcggccactggatgttcaggtccgggtcggcgaggttcacgaacgtgtatgtcttcttctgctccagactccaatgcgcgttcacgagatacgtgtacgcggtgccgtcctccaacgcctggaagctgttacccacgccacgcggcacgtagatcgccttcgatggatccaatacggtcgtgtacacctggccgaacgagtcgccggggcgcaggtccacccacgcgccgaacacgctgcccgtggcgatcgagatgtacttgtcccacggttccgcgtggatgcctcgcgtcacgcccttcttcgcgttgaagctgatgttgttctgcaccggaccgaaatccggcaggccgagcgcggtcatcttcgcccgctgccagttctccttgaaccagccacggttgtcgccatgcaccggcaggtcgaacacgatcaagcccgggatgttcgtctccacagccctcagatctttttcgaaatccatgtaatccatcccctcactggccctgctgcttgtaacgcgcttcggtcgcggccttggccggttcccaccacgcacggttctgcgtgtaccattcgattgtctgcttcagacccgattcgaagtcggtgtgcctcggcgtccaaccgagctcggtgcgcagcttggtcgagtcgatcgcgtaacggcggtcgtggcccggacggtccttgacccagtcgaacgcgtcttccggctgtcccatcatcttcaggatcatgcgaagcacggtgatgttgttcttctcgccgttggcaccgatcaggtacgtctcgccgatgcggcccttggtgagaatcgtccacacgcccgagctgtggtcctcggtgtggatccagtcgcgtacgttctcgcccttgccgtacagcttcggacgctgcccgtccaggatgttcgtgatctggcgcgggatgaacttctccacatgctggtatgggccgtagttattcgagcagttcgagatcgtcgcccggatgccgtacgtgcgagtccacgcgcgcaccagcatgtcggacgcggccttcgtgctcgagtacgggctggacggatggtacggggtatgctctgtgaacttcgccggatcgtccagggcaaggtcgccgtatacctcgtccgtgctcacgtggtggtagcggatcccatacttcctgaccgcctcgagcagacggaacgtgccctccacgttcgtcctcaggaacggctccggatccgcgatggaattgtcgttgtgcgactcggccgcgtaatgcacgatcgcgtcatgccccggcacgattttgtcgagcaggtccgcatcgcagatgtcgcccaccacgagctccacacggtcctcgggcaggcccgcgatgttctccggattgccggcataggtgagcttgtccagcacggtcacatgcacgtccggatgataatccaccacgtaatgcacgaaattcgacccaatgaaaccacagccaccggtcacaatgatgttatggggagtaaacgtctcttcagtcatattaataatcctaccgctcacacaccccttttggaaagctcctttgtttcaggcgtgttgaaaatccataaaaactttcgataaaaccagaaatacttaaatttcaaaaaatatcactgaaaagcactcatttttttgaagcctactcaaaaatgaatgttttttattgattattttttcttttcatttctctaatttgcgaaagactcgctgcaatatgaaccatctgtatgataattataataattacacaaataccagagataattttccaaccacctatttcccaagcagtaaaaatcgattgtgtaattaagagcacaagagtaggagctagatatttccagccaacttcgaactgaatgaatcttttcgcatcaattacacgcatagcaaataccatcgcttgtcccaaagctgacgcgacgcatgctccagtaacacccataatcggaagcaacatcggagtaaacacgacgcaagcaactgccccaaacaccgtggtcttcataacaaaggacgtgtgcatcgtagcagaataaacagtcccataaaaagatgaaaaaacactaaacaaattagcaatcaataaaatgctaatcataggccatgctttatatgtctctccctgcaacataaatgttgctactaggggagcaaagaaagacagcaccgtacacagcacggtaagcactgcttgtaaaacacaaaacacaggagaaaagaaacttcctatttttttgtctttaacttcttgataagcagacagctgccaagcctgctgaaaaaccatataagctgtgttaagaagaccagggattttagatgcggcagcaaacatgcccgacgccgcgatgcccagcatcccagtaataaataatcgattaattcctgtacttagccaccaaaaaagattattgggtatcaatggaagagcataaataatcatgggccgcacaatattccatgtatctcgcacggcaactattctcatacgtttcatgccagatagaaaagcttttccgattccacctgcaaccatataaattatgactgcaagaagtggacccgcagatactgaaataaaatatccagtaatgcccatctttagttgcccaatgaaaaccagagcaagaataaacgtagtaattgaagaaataccagcgcatattgggataagtttaatttctcctatgccacgtgccacttcaccacataagttcataaaagcacttgtcgcataagccagaataaaccatgctttatattctccaagaccgccaaatgcgcctaaatcaagtattggcgaaagaaccgtcacgagcactacagagaataacgttatcaaaattgaaatagccacataatcgtcttgccgatcagaatcgcctacgataaagcgcactgccgcttccgcgatggaaaacgtcacaagaggagtcgcaagattgatgacagtaagagacatatcagtaaggccgtattcccccgcactcatatagtatgtgtagagaggaactaagaaaaaagtaattaacttagttgccaccgcattaatcgcaaataaaacggtgttgagaatcaaccgtctatacttacccatcccagacttttctttctaaaaacgttatttcctaactaaataaacattaatcatcttaacaaagaatgccgaaacaacccaaacagccgtccggcattctgtttattatctgtttattacgctattttcgtccagtcagtaaagcagccgcttgacgcgcattctcagatcccactaactttttgattgtttttttcatatggtgtttcattgactcagaaaatgaaagcatctgattgaactcaattaatttttgatatgcctcattttcattatcatcggacacaaacacttccatgacaataggctccgcagagtcagcgagaaattcttcacactgctgcttgaattcatccattgaagaagcactcatatatctgaagccacaatcacaaacccaaccagaagcagttttgaaatgaccgctggcagcaatataacgatctacatctttatcgtgaccaacacccagtttaaattcaaaaccaccgttattgttaatcaaaagaactctgacattatttttgattcctctaatggaaagagaatttatatcatacaaaaatgccaaatcgcccgtaaccataagacaaagatcatctgttgcaaaactctgtccaatcaacgtagacatgccaccgtcaatgccaaaagctcccacgttcgagaagaagcttatagaatcctcataattaaaaagatcccatacacgtaggctattgagaatagcgagctgaacagtgcttcgagcaggaacacgcgatgacatatattgtgcaatggcaacattggaaaatggaacttgaacatcagtcgtaatatttgaaagtagcccaagccactgtctgatatatgtatcattattacgcttttgttcatcttcacagtgacatgctttttcaaaaaagtagcgttccgagcactggaaaactttcgtgagtttgtcgtatgtatcgacaacatttccgtcttctgagacccgccaatgctcaatagcggaaaactctggctttgaaagcatcttgtacaacgggtaatcgcctgtttgtccgccaatcgtgattacaacatccggcgccattttgccgaacatttcggtattcaacgaagacatcagcatattcgtgataacgcaatattccgaatgaaaattcgataataaattcgcatatacaacagcgccccatcgattgcagaagtcatcaataagtctgtgtacttgcgcttcgaaaggacggtgttctccaatgacgagcatcacctttttcccgtacaaagacaggttccaatcatcctctgttccatatctatgcatgcagcgcagagagggttcctcatccttcaggggaaaatccagccaaggaatacacaactgaacaggtcctaagccattgtgagtaagctcctgtatagcttgattaataactcgaatgctgtgatagacatcattaatatcagagatatatggcgctacaaatgatttttttacactatccgcaggtagcgaactctgatctggcgcctgcatatactcttggtacgtaaaacgaggatgtttctgcatacaaatagcgagcaaaggaacatgcttataatacgcttcagtaagccctggaatatagtttcgggttgcctgagcactggtgcagcacaaggcaaccggcgaaccggtctgaagataaacaccaatagcaaaataagccgcgctccgttcatcaacaacagaatgacaaataaaaaatggatcatcctgtatagccttgattagggcgatattagttccaccaggactaatgaccacatgattgattccatttgacttcagcaaacgcgtcacaatgctgatgtttttcaagttatccggcatggctttcctcaactatctttcaaaaattaattttttaatgaatatccaccatcaagtacaactgtctgtcccaccatgaaattgcaagcatcacttagcataaaaactataaattctgcaatttcctcaggaagggcaactctctcaagcggattctgcttacagtaggtgttattaccctgttctaaagcaaagttctgcattgaagttttcactacacctggagcaacgccattaacaagcacgccgtaaggggccatctgaaggccaagtccagcggtcaatcctcgtatatcccatttggacatacgatacggatatgtagctccgacgaatcctccttgcgaagagatattgataagatgccgataacagcctgaagaagcctgcatccaatatttgcagaaagcttgtgaaacaaagaacgtaccttgactattagtctcgtacactcggttccactcagatacacttacatttgggaaaaattcatgaggttgaattccggcattattcacgaccgcatctacgcatccacccaagtagtcgacgcactgtgcgactttatcatcagcttgtgcaaaatcggttatgtcccaaagaacatagccggcatgctgcggtcccaaatccgatacagcctgtttaagtttttcctcattacgcccagtgattacaactttggcacctgccgcgatacttttctttgcgattgcaagtccaatacctgaacttccaccagtgatgacaatatttttcccagacaaagcatcatctttttggacctgatcaaccttaatggtattgattccacctgcttttagcacttgggaaaaagcagagcaagcgcgctcaattctgagaaaagccttacctagtttcttaatcacttgatatcacagacctatcaatctttgtcagtcgccaatataaagcgattgaaccagtctttaagatccgcagagaaagctcccagattctgagaagctttctcaagtgctttacattgagcctcacgtagcttctcggtctcatccagatacttcagggtcaaggcaactgcttcatctgtagacagcttccttccatcaatcaaatacggataaccaatggattcatacaatccctcaaacttcggactgtaagcgaaaggaagagtgacaactccagaagaaaatgcgccaatggtggcatgcatcctagcaccagaaaatacatccatattagaaatgtacccctttgcctgcatcggagaaacaaaatcaggagctaaaatacaatgctcatactgttccgacagctccttgcaaattggggaatcacattccggatacatgtcgcctaccacatgagggatgagatgtacgttgtaaccgcgttcaatgatttcaggaataagccttttaatgtattcacgataattaacgctcaaaccgaactggttagattccgtatatccaccagtccagagaagacccgaaacattcaaaccgaagctcggacgtccacagccatctatttggacttggtctttgggcaaggcaaatgccacatctgtcgtagtaatcgcctttataccagtaatgctttcaacaagtttcgcggattttttatcacgagcataaactctatctgccgaagaaataagccatttagccatttttcttacgtgcttatttttaaacggcccatatgtctgagggccaagaacaagacatccatccttcttaatggttacaaacttaaagaaagaggtcagagcaaatctttttagcccataaatgtcggagaaactatctccctcagtaaaatcaaagaccacatcacactcttcgattttagctttagctaacttgatagagttgattttcttaaatgaatatctaatcagttcttcggatacccatttttccgaagtaactacataatccttactatcaacgttagaaaaaacaactattttcagttggacattgtcattcttaaatatatcaatcagcaatttgcgaaaggcatatgccaacgcactacacccgagattaggggagcagaagcttaatccacataatccaatagaatactttttactcatcatgaaagcctttcttatatttaatgcaaagaaaattcagaggaagttaccttttttgaaaagagtattagctcaataaaaatcaaccatatatattgaagattatatgtaatacccataaatgcaatcactaggaaagcataaaaaatagcccctttctccctcaagtttaaaactccacccataagccaaacgtagaagaacaagaaaccaataattccaaaatttaataaaatattgacaaaatcacattccacaatccaaacctgatcagagtattgccctgtcactgcagaatatggaaaacctgaacaattgataccaaaaccaaaaaaggcattagcaaatgaaccatgccctaatgcataaggcaaattggtaaaatagcccaaatgcgcagaagtgctcgaatccatagcggaagaactattcaataatccatctatgcgataagagaaaacttcccaaagtctatcaaattgctgtctaatgactccaaatgaacgatatgaaacaaataagaagattaaaatcaaaacaagaccagcaaaaatagaagaaatatttttcttacatttcaccaaaacgttcattttactcacattgtatacaatcataaatacaatgcacaggctcatgccaatcgttaaagttgcactttgtgttaaaaaagcactaacagcaatgatgatctttaatatcaatctcttttctaagaaaaaacctaaaaataaaataggtgcaattccaccagcgttccaacaaagaccggtaggtacataaccagtacctttgtactgtgatgctttttcaacaagaccaagaatgtccgaaaaaataagtttatttacatctattttcaataaattccacagaattgtttgacctataatccatacagattgcactctgcaagaacagcacaagccgctcagcaattcataaagacaggtttctttattatcactttcaacaatcgaaaaagctaacacgaatataataagataatttaaaagaccttttatattgttgatcagatatccgctaggtaaatttgaaaaaagagaaactagaaaagaaaaaacaatcgaaactagaaaaggaagaaatttagtatttatgcaaatactaagattatttctcactaatccataaagaaacaacatatatgcaaatattaggaacagtgaaataccgcctagctgaataaccgtaagacttgagaataagcctaacaaaaaaaggaatctagggttaatgctaccgcgcattccacgtttgcaatacatagaactagacatacattaactcaccaatcacctgcacgaagccctgtttcaaaaaaccgcccttaatacttctataaatacgagatatcttagatgctgaacaaaatgagttaaattcgttcacaatttctaattgtgaatctgaaagttctttcttatatttttctccaaatactgctgcctgagcatgcgccatctttaacgtttcctttacatgagcactgccagacaatctttttaagataaaacctagggtattaacttttgtcgccccaaccacattatttccatgctgtcgatacttaatcgtcgcgtccggcacacatacaattttcccaaatacggcagcgacaagagcaatccaccaatcatgcatcgcaacagatggatcagtcaaatcaagcaaattgttgagcttagaattccaacacatcgtgcaaccggtaatattattttgtacaagtaaatgaggcaaatccgtgacattgggatttaaagccctataagaaaagaatgaagaaccaagtgtctcgagtttatcatttacaacttctaaatcagtatgaacaaggactgggccatcataatttgattctgctcctttcatcgctaagagagtagtttgaattttatctgttttccaataatcatcttggtcggaaaacatataatactggtgtggagcattatatgtgacccatttttgtattgcagcaaaatttgcttttgaactacccccaactagagattcatctttaatctcaattattttatctggatacttctctgtgtattgctcaataacatcatgcgtagagtccttcgagccatcatcacgaatatagagagtccaatcttcaaatgattgagaaagaatcgattcaatttgctccttcaagtatttcgctccattataggtagctaacatcactgcaacactcgacatataaacctttcccattcaaaatttaatatatttaagaagacgattatattcatcggcaatatgctgccaagaataggcttcaacaacacgctgggatgacttctcccccaactcagtaatctcaccggcgttcatgttatctgcttggtcaataagcgaagccaagttgcccggttgcttattccagtacagtgcagcatcctcagcaacctcgcgattgaagccaacatccagcaacagattcaaatctgtggatccaagagcttccaataagcttggattggtgccaccgacctcatgaccgtggaaatacccatatgcattctcacgaatcttcatgagcagttctttgtcatacacggttcccacgaatttgatacgcggatcctgatcaaagtgtgtcttttccttcagctcttccaagaacttgtcactcacattggtgataagcgcgaaatcacgcttggaacggctcttcatgaattcacgaatcatggtttcatagttgttttccggcacgaaacgtccgacaaccagataatacgacttcggagagagacccttctccttataccaagaaatcagcttctgatcatcatcagccagcttgcttttccgagtttccgcaccatatgcgatgaacgtagtctttggattatatttaccgtattcgtcgtgaatatatttctcgatattcttgctatcgcagataagcaggtcacagtgcttggtcatcagctgttcggatatcttccaatacttgcgtaccggagcactccacttggcacgcatccactcgtgaccatccggattgatatacagctttccaccaagcttatgaatcactcgctggaaatgcgccgcaaaaggcccaatgcgacatgcaagaatatacacaattgggtgttgaatattgtgctgcttgatgtactttacgcaataattcaaagctgcgacatcgtagtagattgcctgagccggaccaatatcgggtactttcacatcaaagcaatcggcgttatggtattcaaaagttttggtgtccttagccttgcatgccacatggtatttcaggctcggattattctgatggtactcagtgagcttgtccacaaatgtttcatagccaccatagttaccagggatgccttttgatcccacaataaaaacatgctgcactgaagattcgtcctgtcctgttttcttcattgtcgccttcatctagtacgcacccttgtaatccttgttacgtccttatgccttctatcagtatgcacccttatgagtgacgacggcaccgacagtgcggaaaagcagcacaatgcctcccaatatggaccagttctgcacatagctgacgtccaaagactcggattcttccttactcaagttggatctgccagacacctgccacgggccggtaataccaggcttcaccagcatacgagtggcatacgtctggttgtattgagccacctcctcaggtaacggcggacgcgggcccaccacgctcatatcgcccttcaacacgttcaggaactgcggaaactcgtcaatggagaacttacggataaacttgcccaccttggtgactcgcggatcgtccttcatcttgaagataaaacgaccatcctgaccggtttctttcgccagttctgccttcatcttgtccgcatccaccaccatagaacggaacttgatcatcttaaacggcttgtcacggcgcccaactcgagtctgcgtgtagaaaataggaccgccgtcggtaagcttgatagcaatcgcaataggaacggtaacaatcgcagcaacaatcacggcaaacagcgaaaccagcacatcaaaaacacgttttttgcacatatcccatggcgaatactgcggtaggctgatcgtcatcaccgtcgtaccctgaatcacacggatgttggtctcatgaccactcacgtccactgcagaagtgaccaccgcaatctccagattcatggtttccatgttcagcacaaacgtgttgaaattatccgagaagcgctgcataacatccgtaaccatcaccgtctgcacgcccatggacgcggcacgttcggcgaagttcccgcaatacggcaatgtgacgatgtccctaccactgatcttgcggattcgatccttgaaatcagcaggtgcgacaacggcctccacgagcccagtccgcttgttcaaaccaatcgggcacaccgcaatagcatgataattcagttgacgcttctggctcagaaattccaaagcatgttcaataccatcaggggaaccaaccaccacggtgccatacgaatatgcgcccttttcacggctggacagcacaaactggcggataatcaaacgctccagcatggtaatcaggaatgcgcacagcaacaccaagccggtatgcagcaaaggtatataaacgttgagaatagaatcaactgcacaaatcatcaatcccgtgaaaaacgtgcctttgaccagtagcgcgttcaactggtaaccgtcactcatcacatgacggtggtacacgccaacactatgcaggcagtagatccaaatcaacgagcaagcaagcgcatacagccacaaaccaatatggaaatggaaacgggaagaatacaacgcttccccgccctgccacacatatatgattgccgaagcgccaataaatgaagccatgtcgcacagaatcaaaagagcattgacgaaaaaacgccaataagcgacgctaagcacccgtttacgggaggtttcactcagattcgtttcagcgctaccgctttgggacatccttctctccaaccctccctctgatatggcctgatttttgttccgcccttatagtggggcggcttgcgccgcttggtttgcataatactcggtttcggtccgttccggtgtcctgtagcccaaggactggtgcagacgcttcgagtccccgccacgagacccaccggaacgtcgccaattccaggtccctcaaatcctggaagggcttgcgtcgccagacgagctcggtcctgtacgcgccgtcggcgctctcggccatggcgttgtcgtacgagtcgccgaccgtgccggtcgagggaagcatgccgaattccccgaccctggtggtgtacacgaggctgatgtactgcgcgccatggtcggaattaaaccgacatcggtttaacagcgattaagccgggtttgttgttaagccggggaacggttcggggtcttggtggctggccgtgtcccatgtggtttcccggcttaacgttccgggttatgttcgtcttgtcccatttgattcgaacgaaggagtttgccatgggtgagacgacggttggccatgtcgcgggcgaggtggtccgcgcgctttacggggccggttatatggaatccaccataggccagtaccgcaagtccatcagggcgttggaacggtacgccggaggcccggatgcggtgtacacgcgtgggttgggcgcggggttcgccgcgtcgaccttcagtgagcggacgggcggtttcagcaggcagcggtggttcgattacggcaggctggcgcgtttgtgcgactcgtatctgcggtccggttcggtggacctgggcaagtggcgcaggagcaggcttgcggagccggtggttccgggtttggccgtggtcatggagcgttgggaggcgtatctcgccggttcgggactggcttcggcgacggtggggcattaccgtcggatggcgggcttgttcctcacgtggctggaatctcatggggtcgtgtcgttggatggttcggatggctcgcatgtgctggggttcctggccgggctgcgttcacgctggtcggagtcgtcgatgcggcacgccgcgtcggacctgcgcccgttgttcagatggctcgggcgggatgacctggcggacgcgatcggcctggccggcatacgcaggacccacgcgatcgcgggaacgttgcccgacgacgagcaccgccgcttgctggaggcgtgcgcctcgcggtcggtgccgtcgagggacgcggcgatcaccctgctgtcgctgacgtgcgggctgagggcatgcgatgtgatcggtctgaggatcgccgacgtggattgggattccatgagtataggtctggtgcagcgaaagacgggcaatccgttgaccgtgccgatgacgggaccgctggccgcgaggctggcgtcctggctgttggacgaaaggcccgccaccgacgacgaccgtgtgttcgtgcggtacaaggcgccccatgtcgcgcttcggggtcattcatcggtgtacgaggcgatcagccgtgtcatgcggcacgccgggctcggacgccggggcggttccaggctgttgcggcgcaacgcggcgacgaggatgctggaggcggccacgccgttgccgacgatcagcgcggtgcttggccacgccgaccccgattccacacgcgtctacatggccacgcaccgcgggggaatgctcgcgtgcgtgctgcccgtgccggaaggcggatcgtcatgagacccacggaacacggattcgtcggcccgctcgccggcgaattggaggagtacatccgcttcaaggcgtccatgggcaggcatggcgccacccgcgtccgggtcctgcgctcgttcgaccggcattgcctcgaacacggggccgtgcgtctggagcggggcgtcgtggagcgatggatcgcccataggatcgacgcgaatcccgggggttgccgctcgtggttctcgtacatcagggacttcggcaggtggatgcgactggcccacgatcccgacgcgtacgtgctctccgaccagtggaaggccggatccccgcgtccgacgccgtacctgctgacggaccgcgaggccgccctgttcctgcgggccgcgggaacgttggagtctccgtcgccgtgggcgtggcagtctcgcgcgttcttcatgctcatggcctgctgcgggctgcgcacccgagaggtcaggagactcgccgtcgggcacgtcgaccacaaggcccgttccatcgacgtggtcgattccaaggccggtcgcagccgcaggctgcccgtgggcgacgaggtcgccgccgaactgctggaatgcgaccaacggtcccgcgaacgcttcggagacgaccgtcccgcgttcttcgtcacctccaccggcaatccggtctccccgggcatgcccggcgtggtgttccgccgcgtctggacgcgggccgggctcgagtggccacaagccggcaaacggcccaggccctatgatttccggcaccggttcgcgttcgcgaacatcgagcggtggactcgcgacggcgtggacgtgatggcgatgctgccctatctggcggcctacatgggacacgccggcatcgacagcaccctctactacgtgcacgccagccccgatttcatggacggatacgcggacctcgtcgccgacgccgaacgcgtggtcccggaaacggaggaaccatgagcaaggcaaggaaaacggccgccagctccggtgaaccggacttctggcgagtcgcgcgcgactggctgcaccactggctgcccaaggtgcggggcagctcgccgaagaccgtcgaggcgtaccgcatcggcctggaatcctacgtccgatggctcgaaaccacggaaggcacgcagcgcagccacatcggtttcgggcatttcgaccgggcgcgcctgggccggtgggtcgaatggatgcggaccgagcgcgggtactcggaccgcaccatcatgctgaggatgacgacgatgcgcgtgttcctcgaccacgcgggcctcgaacacccggcattgaccgcgctgggcaacgacgcggccggcatacgtgtcaaaccacccgcgcgcaaacccgtcgaccacctcggggaggagcacaccaaagcgttgctgaccgcatggggcaccggcgacgccaaatcgcgcaggaaccgcatgctcctgatcctcatgtacgacaccgccgccaggatcggcgaactcgccgcactgaccatcgcggacgtgggtatggataagccggccagggtcacgctcaccggcaaacgcggcaagagccgggtcgtgcccctgggagaaaggacacgaacccacctggccgcctacctcgaggaattccatcccggaccgtccatgcgcgacggcgacaggccgttgttccactcgacgaggaacggcgccatccagccgctctccgtggaccggatcgacgagatcctcaaaaccgcggcggccagagcacgccgcgggacgtgcccgtccatgcccgaacgcgtccactgccacctgatccgccggacccgcgccatggacctctaccaacagggcgtgccgctaccgctcatcatgcaactgctcggccacgaaagcatgagcacaaccagcgcgttctacgcgttcgcgaccctcgacatgatgcgcaaagccgtcgatgcggccaaccccggccccgacccctccaaggagacatggctcagcgagcaacgactccgacaactacacaccctcaaataacccggaacgttaagccgggaaaccacatgggacacggccagccaccaagaccccgaaccgttccccggcttaacaacaaacccggcttaatcggaatggtgcacgagaccgtccgcgccgccatgcgaggcggcccatgatatcgcctgttccagcgcctgcaacggcagctccctggtgtccatggtggtggcgcacgcccatccgacgatcctgcgggcgaacacgtcggcggcgaacgccgtgtagccgaacgagccgttggccatgcgcacgtaggtgatgtcggccacgtgcagccggttcggtgcctccgcctcgaacccgcgttccacgaggtcgggcctgccgcccgtgcccttcgccggtttggtggtgacgggcgtcctgccgcggcgcacgccgcggattcccgattcccgcatgacgttcatcacctggtcgcggccgatctcggccggatcccagccccgcgccaacaactgggcgcgcgtcttgcggtacccgtacacggccatgaagaaatcggcatggatctcgaggatgtcgcgggccagtgcctcgtgcctggcggccatgcggctgacgggcctggatctgaacatgcggtagccgcgcggcgtgacggacccgcagtccagcgaagcggccagcaccctgcagatcggcccgaccctgaaacggtccttgaattcgtcgatgtaagcgaccatcaacgccgtgtcgggtcgagccgtgccgcgaaaaaagccgacgccgtcgtcaatatctcgttcgcccgcctcaatcgcgcgacctcggcccgcaaactcttcaactccgccatcgcgtcttcggccgaccgcttggtctccgccgcgaccgtggcgtccgtcttgttgcgccaacggcgcagcgtctccggcgcgacccccggatccttggcgacctgttcgatcgccttggtctccgacgaatacgagccgcgcgactcggtcaacagcctgacggccttcgccttgaactccggcgtgtatctcgttccttttgccatggttccatcatctcccatcgagttaggggaaatgcggaacaaaaatcagttcatatcagctccaggtccttcagatcatggaagggcttgcgccgccagacgagctcggtcctgtacgcaccgtcggcggattcggccatggcgttgtcgtaggagtcgccgaccgtgccggtcgacggcagcatgccatattccatcaccctggtggtgtacaccgtgctgatgtactgcacgccatgatcggaattaaaccgatgtcggtttaattccgattaagccgggtttgttgttaagccggggaacggttcggggtcttggtggctggccgtgtcccatgtggtttcccggcttaacgttccgggttatttgagggtgtgtagttgtcggagtcgttgctcgctgagccatgtctccttggaggggtcggggccggggttggccgcatcgacggctttgcgcatcatgtcgagggtcgcgaacgcgtagaacgcgctggttgtgctcatgctttcgtggccgagcagttgcatgatgagcggtagcggcacgccctgttggtagaggtccatggcgcgggtccggcggatcaggtggcagtggacgcgttcgggcatggacgggcacgtcccgcggcgtgctctggccgccgcggttttgaggatctcgtcgatccggtccacggagagcggctggatggcgccgttcctcgtcgagtggaacaacggcctgtcgccgtcgcgcatggacggtccgggatggaattcctcgaggtaggcggccaggtgggttcgtgtcctttctcccaggggcacgacccggctcttgccgcgtttgccggtgagcgtgaccctggccggcttatccatacccacgtccgcgatggtcagtgcggcgagttcgccgatcctggcggcggtgtcgtacatgaggatcaggagcatgcggttcctgcgcgatttggcgtcgccggtgccccatgcggtcagcaacgctttggtgtgctcctccccgaggtggtcgacgggtttgcgcgcgggtggtttgacacgtatgccggccgcgtcgttgcccagcgcggtcaatgccgggtgttcgaggcccgcgtggtcgaggaacacgcgcatcgtcgtcatcctcagcatgatggtgcggtccgagtacccgcgctcggtccgcatccattcgacccaccggcccaggcgcgcccggtcgaaatgcccgaaaccgatgtggctgcgctgcgtgccttccgtggtttcgagccatcggacgtaggattccaggccgatgcggtacgcctcgacggtcttcggcgagctgccccgcaccttgggcagccagtggtgcagccagtcgcgcgcgactcgccagaagtccggttcaccggagctggcggccgttttccttgccttgctcatggttcctccgtttccgggaccacgcgttcggcgtcggcgacgaggtccgcgtatccgtccatgaaatcggggctggcgtgcacgtagtagagggtgctgtcgatgccggcgtgtcccatgtaggccgccagatagggcagcatcgccatcacgtccacgccgtcgcgagtccaccgctcgatgttcgcgaacgcgaaccggtgccggaaatcatagggcctgggccgtttgccggcttgtggccactcgagcccggcccgcgtccagacgcggcggaacaccacgccgggcatgcccggggagaccggattgccggtggaggtgacgaagaacgcgggacggtcgtctccgaagcgttcgcgggaccgttggtcgcattccagcagttcggcggcgacctcgtcgcccacgggcagcctgcggctgcgaccggccttggaatcgaccacgtcgatggaacgggccttgtggtcgacgtgcccgacggcgagtctcctgacctctcgggtgcgcagcccgcagcaggccatgagcatgaagaacgcgcgagactgccacgcccacggcgacggagactccaacgttcccgcggcccgcaggaacagggcggcctcgcggtccgtcagcaggtacggcgtcggacgcggggatccggccttccactggtcggagagcacgtacgcgtcgggatcgtgggccagtcgcatccacctgccgaagtccctgatgtacgagaaccacgagcggcaacccccgggattcgcgtcgatcctatgggcgatccatcgctccacgacgccccgctccagacgcacggccccgtgttcgaggcaatgccggtcgaacgagcgcaggacccggacgcgggtggcgccatgcctgcccatggacgccttgaagcggatgtactcctccaattcgccggcgagcgggccgacgaatccgtgttccgtgggtctcatgacgatccgccttccggcacgggcagcacgcacgcgagcattcccccgcggtgcgtggccatgtagacgcgtgtggaatcggggtcggcgtggccaagcaccgcgctgatcgtcggcaacggcgtggccgcctccagcatcctcgtcgccgcgttgcgccgcaacagcctggaaccgccccggcgtccgagcccggcgtgccgcatgacacggctgatcgcctcgtacaccgatgaatgaccccgaagcgcgacatggggcgccttgtaccgcacgaacacacggtcgtcgtcggtggcgggcctttcgtccaacagccaggacgccagcctcgcggccagcggtcccgtcatcggcacggtcaacggattgcccgtctttcgctgcaccagacctatactcatggaatcccaatccacgtcggcgatcctcagaccgatcacatcgcatgccctcagcccgcacgtcagcgacagcagggtgatcgccgcgtccctcgacggcaccgaccgcgaggcgcacgcctccagcaagcggcggtgctcgtcgtcgggcaacgttcccgcgatcgcgtgggtcctgcgtatgccggccaggccgatcgcgtccgccaggtcatcccgcccgagccatctgaacaacgggcgcaggtccgacgcggcgtgccgcatcgacgactccgaccagcgtgaacgcagcccggccaggaaccccagcacatgcgagccatccgaaccatccaacgacacgaccccatgagattccagccacgtgaggaacaagcccgccatccgacggtaatgccccaccgtcgccgaagccagtcccgaaccggcgagatacgcctcccaacgctccatgaccacggccaaacccggaaccaccggctccgcaagcctgctcctgcgccacttgcccaggtccaccgaaccggaccgcagatacgagtcgcacaaacgcgccagcctgccgtaatcgaaccaccgctgcctgctgaaaccgcccgtccgctcactgaaggtcgacgcggcgaaccccgcgcccaacccacgcgtgtacaccgcatccgggcctccggcgtaccgttccaacgccctgatggacttgcggtactggcctatggtggattccatataaccggccccgtaaagcgcgcggaccacctcgcccgcgacatggccaaccgtcgtctcacccatggcaaactccttcgttcgaatcaaatgggacaagacgaacataacccggaacgttaagccgggaaaccacatgggacacggccagccaccaagaccccgaaccgttccccggcttaacaacaaacccggcttaatcgctgtggtggacgaaaccgtcgctcccgccatgcgacgcggcccacgcaatcgcctgctccaacgcctgcaggggcagctcccccgtgtccatggtggtggcgcacgcccatcccacgatccgcctggcgaacacgtcggtgacgaatgcggtatacgcgaagcgcccgtcggccatgcgcacgtaggtgatgtcggccacgtgcagccggttcggtgcctcggcctcgaacctgcgttccacgaggtcgggcctgccgcccgtgcccttcgcgggcttggcggtgacgggcgtctttccacgcctgacgccctgtatgccgagcccgcgcatgatgttcatcacctggtcgcggccgacctcggccggatcccagcccttgccgatgagctcatgccacaccttgcggtatccgtacacggcggagaactcgccggcatggatgtccatgacgtcgcgggccagcgcctcatggcgcgcccgcatgcggctgacgggccttgacttgaacatgcggtagccgcgcggcgtgaggaaaccgcatgtccaacgattcggacaggaccctgcaggtcggcccgaccttgaaacggctttcatgctcgtcgatgtacgcggccatcaacgccgtgtcgggtcgagcccggccgcgagaaaagccgacgccgtcgtcaatatctcgttcgcccgacgcaattccgcgttctcggcccgcagcttcttcagctccgccatcgcgtcctcggccgactgcctcgtctcctccgcgaccgtcgcgtccgaccggtcgcgccaacgccgcagtgattccgtcgctatccccggatccttcgccaccgcgttcctcgcgttcgtctccgacgaatacgaggaacgcgattccgccagcagcctgaccgccttcgccttgaactccggcgtatatcgagtgccctttgccatggttccatcatctcccatcgagttagaggaaatgcggaacaaaaatcagttcatatcaagccgcaccatgcggatgctggggtatccgaaaagcaaggagctgctcatggcgtggatcgacgagctcgctgacgcgtaatttgaggccgtaccggggcttcctcaacgcggtagtgcttacgcatgctggtcaggatggtgcgcagcgctttgttcgtctgctctgctgcggtacggaactttgcatattccttgccgtgcggatcttcaatatcctcaggctcaggaagcataggccgaataatggatgcggagttgatcactgactgcaagcgttcctgaatggtcagtcccttgaccagtccattacgcgcacagtactcacacatgttcgcaaagtcgcccagcaggaacgtgtatttcacagcagtgggagccaacgtgacaatgtctttacgctgatccttttcaaagcacagaatcagatcagcggactttgccatcggctgcgtcaggcgccgagaacggaacccactcggttcgatccctacgctttccataagcagggcgctgttgggatcaatctgatgcatgggcaaaccatgcgtacccgcgctggaaacctgcaccgtggtgccagagaggtagcgagtgagcaatagctcacccataggagaacgacaaatattgccggtgcagacgaacataatgtgcatgggctcagtccttcttcatacttacaacgctaccttgcgggcctgcatacaaaccactagcgcactattttagtccgatacgtcggactgtgaccaatccgcgtccgcccaccaccacttcatcttcacatgaatgttacaagggattcactttttgggcggattttgctataggggggggggtggcattcgtgctagggtgggcgagagaatgaatgtttcttgcggtttttgggaacgatggaggaagaattcagtatcatgccgaaggacagaggcacagcagcagagtcgcaggcaacaagcaccgcgaccatggcaatgcccaaagtacgggcgagcgggagccggtcctcggcttcgttctcccccgttgccgaatgtgacattgcgccgacattctttgacggcacctacttctcctctacaccggacggcagctccacacataacgacaccacgaacatacgtccattgatgggccattctgtgccgaagtggcgatatctctataacacgaccttggtcgtgcttgatctgctgatgaccattgtggccacgtacatcgtgttcctgctccgacctttcgcttatacctatgtgcagagcattggtcccggcgaatacggcgtttttagcttcctgctgttggcctgcgtatcgtggctcatcagtctgcattccgcacgctcctatgaacggcacaccatgggtgagggctatgccctgtacgccaagctgttgaacgctgcgttcatcgatttcattatgctgtgcacgttggggtacctgttccacctcaatcttccccggtcgttgaatgtgttcattccgctggtttcactggtgttggttattatcgagcgttggattatgcgccgcgcgctgcaccgcaaccgcatgaatggcgaattcaactacccgactgtggttattgggtctccggaaggtatccaccggacggtcgaacaattgcgccagtgccgtggcctcggctacgcgccaattgcggtgtgcccagtggtttcagttaagaacgaggatgacccggattcggcgcagcatttggtgtcggtgcccttcactcctgccaacgatgctgaggcacgactgaaggtgttgccactcaactcgcatttgccgcaaaccgcgaagcgtatgaaggcacgtaccgtattggtagctgatgtacttacccgtgattctgagaccatgcgtacattgtccctggccgtggaatccatgggcattgaattggccctcactacctctgtggctgatttgagcggcgctgacctgcatttccgcaacgatccgacgatgccagtagtcattgcacgactgacgcagtactcaaccgttacccgcatcctcaagcgtgtgtgcgatatcgtgctttccggtatcgccattatcttgagctcgcccatcatgctatgggtggcatacaaggtcaagcgggaagacggcggccctgtgttctattcgcagacgcgcatcggcatttacggcaagccgtttaccatgtacaagttccgttccatgcgcactgatgccgacgagatcaaggcgaaactggctaaggaacgcggcattgaggatcgttttatcttcaagctcaaggacgatccacgcgtgactaagatcggtcactttattcgtaaaacatcgctggatgagttcccgcagttctttaacgtgttcaagggcgatatgagcttggttgggcctcgcccgccgctgcctgaagaagtcgcgcgatatgacatgctgtattccacgagactgctggttaagcctggtattactggaccgtggcagatttccggacgcagcgatttgactcaggaacagtcggagtatgcggatgtgtcgtatattcaggactggtctatcacgggggacatcgtgattctgttgaagactgtggtggcagtgtttaaggggactggatcgtactgagttttctttgggaatgttgaaatgttgagagaggtcagcttcttgctgacgcccttcttttgtctctccctcagagcctgtggctgacgtcctcgtcagagggtttactgcttgttgatggagcaggcagcagtgtcggtggtaacaccggaatcaatccagcccattggagtttggtcgatagtgaggtcggagacagccttggtagacgtggtcacgtcgaaggaataggtgacggactctccaggagctatcgtggcattgctcgcatacacggtttaccattcaatgtttcttgacggctctccgtcactgaaccaccactgatcttaagattcgagatggagcccccggcaggcgcataaatcagagttttttccacaccttgtccgccggagccaaggatatagctcgttagagcaccaatctggctgttctcaagtgtatttgtcatcttatattccacatgataggtctgagaaccatcattaccacaggtggaacgagtcaccttcgaagtacgatgaatataccatcccatctttgacggattctgctcagtcacatacactcccacctgcggatgctcttcactgctcggagtctgtgcagtaaagcctgcatcactaatggtcttttcagcagtttcgtcgaatgcgtacatggagaagtgacggccttcggccatgctacccataagctgtgcgaccttggtgagtttagccaaatcaatattgctgaacatactaccgactgcttgttctgcgacttgagcaaatagggcgtcctgcatggagactgggtaatcaacatacaccttgttcaacaaaaactcagcagtgttatctcccgtaagcaccgttccatcaggaatagtgacattaccactgattttcgtaagttcctgcaaaaatacaggatcaaccatgagcacgccgtccagctgagtattgcttccccacggcgtgcgctgccaaatcgcgcgcataccttcggcactgcgtgaagtatcagggtatacggccaaatctcgcacatcgaatgacatgttcaatggtccccactgccggaagatgcgctgctcgtcttccgtaggatcaccagcaccatatgggatatattcaccattcgaacggaaatcaccgataccgatcttgccgttgtcggtagttaccacacccacagaaccaatcaggccaccggacgaacgctcctccgaagtggtcatagccatcaacgcatacgtgcgcggctgatcggagccaaggaagtccggtagaatctggaacgtgccggacagctgattgactttgtccgccatcttggtcagctgcgtattgccggtggcataggcgttcttcaccatgccgatatgggccttcggcagctgctgatacttctgcacctgctgctgcagtgactggttcgcggtggcaatattcttctgggcttccagaatcggctgcagattcagctgaccgtcgcctgagctgagctgtgcgctcttcagcgtggaaagtacgttcataaactgcggcaccgaatcactgaccagcgaatccaccaccgaagtcatgccctgcacagtggtgatgtcgtcgccgtacaccggcgccttcgaagcgatgttccacagcgtgccgtgcgcaatctcgttcgcagccgcggtctcggtctttgcctggctgatctgctggctcaccgtatcgaggttgtcgaggttaccgaggtcggtcacaccgcccagcagctgcatcgcctgttcctcatgcgcctttacctgcttggcttcggaatacagcttcaaaccgaagaatccgctcacgcctagcagcaccacaagtagcgccagaatcaacaccacccacggccagatgcggtgccttctgcgtggaatactttgttgcgtgacttgccctatgaacgctcatactaactcccaaactgatcttattgacttgtaacctcttgcaataaccaaccgcctattatgccccggtcttgtgcacaaagcgtgttcgcccccgcttctgcacatattccgaaccgactggaccacccctgggtatagcgtattggggtgctttgagaggctgctcggccaagcacgcgaagacgacggtcgccgaatacaccgaatacgcattgatatgcgaggcgcatatatcactgaacagatacgccaccgacaccgccaaggcaacagaccgggcaacagaagtggggtagtgcgtgactggagctcagggaatcaagaatcgtcgcggcgaattgcagcgggtactgagccgtgaggaatcatacgtggacggtaaactgagccgcgcggcatttatttccatcgcaatcctgacctttattacctttgtcggtaatttcacgcagctgcagctgagttccgcgctgccgattatcgtttccgaattccacatctccgtaaccaccgggcagtggctcacctccgtgttccagctggtcatgggcgtgatggtgccgctgaccgcgtttctgacccgacgcttctccacccgccagatcgtcatctgctcgatggcggtgttcacactcggctccgtgctggcatggttggggccaaacttcgtatgggtgctggtcgggcgcgtgctcgaagctgccggcacgggcgtgatgtggccggtgctgcaaatcaccgtgttctccatttacccgctgtctcgccgcgggtttgccatgggcacggtgggcatggccatgagcgtggcgccagccatcggccccaccttgggcggctggcagaccgatgccaacggctggcgctcgatcttcctgaccatgaccatcattggcgtaatctcgctgctggcggccatgttcggactgcataatttcggttcacacgacccttcggcccgcgcggacttcttctcggcatgcctgtcggtgatcggctttggcgggcttatgttcggcttcaccaattcagagacctatggattcgcggcaccggtcacgtgggggccgatggttgtgggactggtcggcatcgtgtggtttgtgatgcgtaacctgcgcgctggcaagcggtatcgcgaggccgtagccaaggacgagtcggcactcccccagccgccgctgctggacttggaagtgctgaagaaccgttcgttcaccgtcggcaccattaccgcgtcgctggcatttttcgccttcagttcgattttggtcatcatgccgctctacatccagactgaccgcggctattcggccacgatgagcggtctgatcatgctgccgggcgccatcggccagtgcgtctcccagttcttcggcggccgcgcgatggatcggttcggcgcgcgcccggtggctttgttcggttcgattgtgttgacccttggcaccttgggcatgtcgctggtggcgatggatacgtggatctggtgggtatcgatctgccagttcatccgtcagatcggcatgggtttcctgctgatgccgattaccacgtggtccctgaattgcctgaacgggccgagcgaagtgtccgccggatcatcggtgacgaataccgcgcgtcagattgcgggcgctgtgggcgcacccgtgttggtgattctgatggaaacgtttgccgctttgcataagcagggcggcgcctccgccgtcgccgcttcgattttcggcattcaatgggcgctgcgaatctccgcaataatctgtctggcaatggtgttgatggtgttcttcggcgtcaagggcgacggtgccggtcgtacgcgagacattatttccttgcgcgcgctgcgcgaacggcgtgcgcggcgtatggctgcgaactgacggcagatccaaccattctcaacataataagaagccccggtttccaacaccggggcttcttattatgttgtgctatcgcaggatttcagctggagtctattacgccctgcccatcagcgtcaggacaatcagcagcacgttgagcgccacaatcagcgccacgacgatcatgaaaatcacgtgcttgacggttccatcagcccacttgcccatgagttccttgtcatgcgtgtatcgcatcagcggaatcacggcgaacgggatgccgatggaaagcaccacctggccgatgaccagcgcctgagtcgggtccttggcgaaccacagcacaatcagtgccggcaccagcgtgaccacgcggcaggcccacatcggggcgttgacgtgcagcagaccgtgcatgatttccgagccggcgtacgtgccaaccgatgtggagctcagcgacgaagccagcaggccgatggagaagatcgtgccgatcaccgggccgagcacctgcgtgatcgcccgctgtgcgccgtcgatggagtccgtgccagacatgccatgcagcgagttggcggcgagcaccagcatcgccagattcacggtgccggccagcaacagcgcccagaccacatcgattttcgagcctttcagctgcgttttgatcgacggcttttcgccgcctgcgtaatggtcgttgaccaacgtggagtgcaggtagatggcgtgcggcatcacggtggcgcccagaatcgaggcggccatcaacaccgagtcggtgccttggaagcgtggaatcatgcccttgaccacttcgccggggctcggcgggtccacgaacaggcctgcgatgaagccgaatgtgataatcagcagcatcacgatgatgatgcgctcgaacgttgtttgcgtcttgccaccttggaaccacagcatcaccgtggagattgcgccgatcaccaaaccgccgatgaacagcggcaatccgaacagcaggttcagggcgatggcgccgccgatcacctcggccagatcggtggcaatggcgatgacctcggcctgcatgaagaacatgaagcggccggcatcgctcatacgttcacccagcagttccggcagggatttgttggtcacgatgccgagttttgcggactgatactggatgagcacgctcatggcgttggcgagcaccagcacccacaccaacaggtagccgtatcgcgcgccggaggtgatgttggccgccacgttgccaggatcgacgtaagccacggccgccacgaacgcggggccgaggatgctggccagcgcatggtcatgcggctttttcttgccgtttgccacggttccagctccggctccgactccggcaagctggcgttccttctcgatttccggtgtttcctgttcgatgtctgccacggcgttcgtcatagtggttgccgcagtggcatctgctgcggtgtgtgttactgccatatcgtctgttcctattcccttctcccttcataccgggctcagttatagcgcgggcatgtttctcacgtcaacagacggacaatctgcggacgattgatggatgactggcggactggcagctggcattccccgccatctcgctcatgaaatgtgacaaaccgccgaaaactcgctcatgaaatgaggaaattactagaaaactcgctcatgaaatgtgccagacggcagaaaactcgctcatgaaagtgtaaaatcattgctatagcagtaattcggaaaggggctcctcatgtatctcaaacgcaaagccgatgcctatctcaatgcatggaaatccgacccgaatcgctccccgctaatcatcaagggccctcgtcaagtaggcaagacagagactatcgattactttgccgcacacaactaccgttcggtagtgaaaatcaacttcgttgaggaaccgaaatatcgcgcaatcactgcggacggttatggcgcggataccatcgtccgcaatatttccctgatcgacccagccaaaaagttcattccgggcgatacgctcatctttttcgacgaaatccaggcccatcctgatatcgtcactgcactgaagttctttaaaatcgacggcaaatatgatgtgatttgcagcggttcaatgctgggcatcagctataagcaaatcgaaagcaatagcgtgggatataagaccgactacgaaatgcgatcgttggacttcgaggaatttctgtgggctcgcggatacgatgaggccgtcatcgaaagcatgttcacccacctgtgtgatgctacgccattctctgaagtggaaatgaacgtcttctccacggcatttatggattactgcgtgcttggcggcatgcctgcggttgtcgcctcccatatacgcactggcacgttcgagggaacactgcaattgcagcgccagcttattttggactaccaggaggatatccgcaaatacgcgcaaggactcgatcaggcacgaattctcaacgtgttcaaccatattcccgtgcaactcgccaaggaaaacaagaagttccaaatcagcaaggttgccagcggagcgcgtttcaaagactatcgaggatgcgtggaatggcttgaaacctcgggaatggtgaatatctgccgatgtatgtcctatcctgaactgccgttgaaaggcaattatgacgaaaacaagttcaagatatatttcggcgataccggtctgttcgtagcgatgcttgacgacgaggccagtgatgatctgcgggccaatcgtaatcttggtgtctataagggtgctatgtacgagagcatcgtctctgaagcgctacggaaatccggctatgacctgtactactacaaaaaagaggattccacactggaacaggatttcttcgtccgcacgcgcgaatggctggtgccggtggaggtgaaatcgaaaaaaggcaccgccaaatccatgcggacgctaatcgcttcggattcttatccggaaattcagttcggcgtgaaactatccgccggcaatatcggtagtagcgaacacgtgttcaccgcaccatacttcaccacatttttgctccgacggctcctgcgcgcttatgacgaggggcaggcacctatgctcaacaatcctgagcggtagcccctattcgtctgcgggcacggcctggcccgggcaggtgtggaggacggcgagcatggcgtccttttcttgggaggtgacggtgagctggtacttgtctttgacgccaatctggcgggccacgtagtcgcaacggtagtcggcgttggtgggtagccagtaggcggcggaagccgaccccttctcctgattggccgggccgtcgacggccagcaggttgtaggggtcattgccgaattcatggcgtttggcagtggaccagtcgcgcgcaccggattgccaagcgttttcaagggccaccacatggtcgatctgcactttggcgctggtggcgcggccacgtacaaaatggatggtctgagcggtgtacggatcggccagtgtgccggactcgaccacacaggaaccggcgtatttgtaggtgatgtccgtgagatcacgggcgagcacgtcgtcgcgtacgtcgcagccattgccgtcgacgtcggtggtgcggaaaccgaaggaatcgcggtcgtagccggaggagctttggttgtcgtctacggcgagcgcgttcaaagtgtcggcggctgaaccggtggcagtgtagccaccggtgattttggccgcgtcggagctgacctgcggcagtaacaggccgatggtcacgccgattgctacggcgagaacgatgagaatcagcacgcgctccagcggtccagaggcgttgaaacgacggcggaagtgggcgttacgacgtgccatcaatcacgcataggtgaaggtgagggggtcgtggccggcgcgggtggggccgtcgagggcgtcgatggcagcgtgttcatcggcggtcagggcgaagccgaacaggttgagattctccttctggcggtcagcatgcacggacttggggatgatgatcgtgccgttttcgatgtgccaacgcagaatcacctgggccgggctgacctcatgggcggcggcgatcttctcgatggtgccgtcgccggcgttgaggtcggcgccacgcgccatcggcgagtaggcctccacggcgatgccgtgctccttgcagaacgccaccacttcgcgctgctgccacgtggggtgcagctcaatctgattgacggccggccatgcgccggtctcctcgtgcagacgcttcagatcggcgggcatgaagttgcatacgccgagcgtgcgtgccatgccttcgtcgcgcagcttgacgaacgccttccaggtgtcggtgctgcgccagtcgaacggcgtgggccaatggatcatgtacatgtccacgtaatcgagctggaggagtttcagggagttgtcgaatgccttgagcgcggaatcgtagccctgctgggagtcgcgcagcttggtggtgacccacagggtctcgcgcttggctcccttgttgtatccggaagcggcgagcgcacgacccacgccggcctcgttgttgtagccggccgcaccatcgatatggcggtagccggcttccaacgcggattcgacgacggggaccacaccctcatcgtcgatacgtagcacgccgagaccgacttgcggaatggaatgaccgtctttcaaggcgatgtccggcacgttggcggggttgatgtgtccgttggtcatggcttgtgatgctccttcatgtactgcaactacacgccactgtacacggttatgcaggcgatgtgcgggtgctgcaaccaaacggcatgattgcgcccggccttccgtgtgggagagccgggcgcaatcatgacaacatcacgctctactcctgcgaccggccctcgccctattgttcccgggcgcgaatttgccccggtacaggcgtcaatcgattgatgtttgcaccggggcagaaatcgttgtcccggtacgcaatttcgggccattttcgagaaccaggacaagacaatccccaaagtccacataccccgacaaacagaatcggcggaatacagccaatcccgaaatcaacatactgtcccggttctcacgtagaacgattgacgtgcaaaccggggcaacgggaattgtcccggtacgcgaaaaacacccgttttcgcaaaccaggacagtgatttctgtcctggtacccacatcaaacgattgatgcacgaaccgggacagaatcgcatcgctgcgccgagacagacgcatctgacagccgacaaccgataaacgacagccgacagatggcatctggcagtcggttgccggctgccggcaaccgcatcataatgccgcatcagtctctatcaggagcgcttacgacgcaaagcaagcgagaccccgccggccacgccgagaacgacaaccgcaagacccacggcagtcaccgcgctaccggtattgctcagcacaccagtgatcttgtcgccattcgcaccgttggtcttatcgccctcgcccgtatcgggattgatagtagccccgccattacccgcaccgtccgagccgttgccggaaccaccttcggcccgagcggtaaccgcaaccgtataggtttcggtgacattcggattcgacttgagcgttacggtaaccttcgccgcatcagcgggagcggagaaatcgtaatcgagcgtgaactggtcggcggaaagcgtcacgttgcccatgcctgcggaatagttgcccacgaccttgagatcatggtcggcatcgatggcatcgcccacctgataggtggttttgcttggcgtgacggtcaggctggagacctccttttgggcgaggccggcaatggcatcggcaacaagcttgatcacatcgttcacgtcctgctcggtgtaggtgctgccggcaagcagcacgtcagcggcggcaagcgcctgatcgagtttggcgagcgactcgttggtgtactcatcgcgattgattttcccggcttcggccacggccttgtccaggttctccgtggatggcttcaccggagtttcggtctttttgacgagtgagaccttgtccacattgccccatgcgtcggcaggcaggttgcccgtgatggtgatggtcgctgtgccatcagcacccacggtgacaggcacggtggcggtatcgaacttaacccaaccgttgagttccagcgcatcggacgtggtcttgccacccgttgtggcggagagggccacaccatcggtaatagcggcgttgtccgctgccgcgccttggctcatggcggtcagcacgtattcgccaggctcgagtccggtgatggtctgcgtggcggagaaactgtaggcatcggatgcccaaaacttcagcgcgcgcttgccgtcggcggcgttgccactgtcttcggtgatggacgcaccggtgccggcaatggtccagttcttatcgttctcagcgttctcgaagctgccgtccgttacgtaatccttggcgggagtggcggtgacggtgacggtgacggtcacgtcgtggccagcgttggtggtgccggtgatggtgtatgtgcctgcgccacgaatccagtcaagcgcagcggattgccaggtcacggtttcggtctcgtccaccccatcctgatagtgtgcggccacctcactcggcaattgcgctttgatcgcgtcgatggaatccgagtcagtcgcggtaatctccactggatctatcttggtgaacacatgatcggtgacggcaccggtgtgaatgtacttgaacgtcggcagagaggcgagcgccttgccatcgaaatcgaacaaagcttggttgtcgacacctgagccgccccagtacaggccggcgtcattgggatcgtattcgccggccgcttcagtggcccagccgccaccgtacttgttccacgtatccaccagttcggcgttatccttgccgccggtgcccacgggcacccatgcgggctcccagtagaacacacccaggccgtcgttttcgccatcgccatcattgtcgccgatattgttcacggcctcggcgaccgcgcgaatctcatcggcctggccttgcgggctgatgtcgtatttcttgaggttatcggcggttactttactgggcactgtgttggaatcgtcgtcgccatcatccaaggtgtatgcccacgacgtttccgccaccatcacatctttcttataagtggaggccacgttcttgagcacgctggtgaggttttcggtggtgccatgccagaacgggtagtaggagctggcgaacacatcgtaatccacattgtggttgctcaactgtttggcgtaagtggcgtaggtgccggctttctccgggttggtgaaatgaatgacgaccttggcttcggggagcacttcgcgtatggctttggaacctgcggagaatactttggacatgccgtcccagccggagatgccggcgattttcgcagtggtttcgttgccgacctgcaccatgccgacgtccacgccggcttgtttgaacgtggtcagagtctgcttggtgtagtcgtatacggtgtcggcggttttgtccgcgtcgccttcaaaggatttccacgccttgggcacctgctgcttgctggggtcggcccagaaatcggagtaatggaagtcgaccagcactttcagccctgctgccgtggctcgcttggccatggtcagtgcgcgatcggcgttgacgttgccgccgccatatccttggccgtctgcggtgaacggatcgttccacacacgcagacgcacatagttcacgccggattccttgagcaacgtgaacaaatcctcgacctcgccattggcgttcttgaacgtgacgccgctttcttccagcgagagcatggatgagacgtccataccgccgatgaaatcatcgcttaagccttggatggccttgaccgagacgtcggctttaactggttcttcttcggcggcgtttacagtgaacgtgcctcctgcgcagagcattatggcggccacgccggatgccataatgcgagtaagcgcggtatttcggcgcatgctttttctcctttgaatggtgaacgctcagaacgaacgcccagtgatgcttggcgcttcctttccttatgcgccacgcggtacagctgtgtaccacgcaatcgtcaccttagcactttatgccgtgttggtcaaccggtgtatcaacgcctcgtacggcccagtacagcaacaccagcattacagcaatgtcgttcagcgtgtggaggcgcgggcgatgacctgggattcggtggtgagcagttcggacttggtgatgctgccgtcgatgcgtccgaggatgcgattcactgccgtgggagccgtccagtcaaggcgggaatccatggtggtcagcggaatctgcaggtagggggcttcctcgttgttatcgaagccgatgacctgcacctgcacgggcacctcataaccagcggtgcgcagagcggtcaatgcgccgatggccaactgatcgttcaaggcaatcacaccgtcgaatggcacgccggaatcaatgagccgctgggtcacacgggcaccggctccgatggtccaatcctgatcggtgttgccaatcagctgcggatccaaggagagcccacgcctacgggtctcttcgatgatgccgcgcagacgcagctgcgcgttgccttctacggcattcagcaatgcatcttcgtcgtaaacgtcacgggcaccgatcactgcaagtctggtggaaccgcggtcatacaggtagcctgcggccatggcggctgcggatacatcgtctggggtcacgtgatccacaatgccccacgtggtacgcgcgccaacgatgaccagcggaaaatcaaccttcagatcatcgggcgaaatgttttccacctcgctcatggaaaggatcatgccatcggacaccgtggagttgaacttcttcagcagatcgcgcgctcctttggccgagccctctgcatacgtggtgacgtatacggagtagtcgcgctgacgggcggcgtcaatggtgcgattggccaactcggccagatatggcggaatcagcgaaggcacggcaagggtgatgaaaccggtgtgatcgcgattcaggttgcgggcggccacgttgactcggtagtcgaggtccttaatgaccgactcgaccttggcacgggtctcatcggtcatacgcccagagccattgatcacgttcgacgcagttttgagcgatacaccggcggcctgagcgacatcgcgtagcgtcactcgacgcttggctgttttctcgccgctcatgccgcactcctctatctggacaacattgccattctagcgcggtctagcaggacgctttagcaataagaatggcattgcggttcagcgtatagccggtggtgtcggcctcgcaacggtaggcgatgattggttctccctcaatgccgttgacggcaacgggctggtttgagcggttgaggtagaaatcgaagcgggtggagccgtctgcggatcggcggatggtgtgcaggatgcggggatctgtggtgggataggttggagtttgaccactctcagtcggctgcgccgacaactcctgccatcgggagccaagtgctttgagcaactgggcaatgtcgtgacggttgaggtcgcagcccacgtagatggcggtaccgttgccataggggcggctggtgatggcgggggtgcgctccagctcccagtcggcggcggactcacctgcgtaagaggcaagcactgtggtgtccgcggctacggaagtcacgtcgttctgccacaggcgggtcgtcagaccattggacaggctgatttcgctgggctcgccttcggcttcttcaccgaggatgttgaattcttcggagcggatgccgagcatgtcgcgtaggagcccgttgccggcgccggggtagccgccgaggccgatgtggaagtgctcgtcgatcaggccggcggcatagccgacgatgacggttccgccggccttcgcgaagtcggcgatacggagaacgtcttcgtcggacaggctgagcacggtgggcagcacgatggttttgtagccggtccagtcgtaggcgagcggcaccacgtccgcgcgcagcccggcatccaggaagccgcggtaccagtcgcgcacgtcgtgccagtggttgagtttcatgctgggcagggtttcggagcgtgtggcccattcggattccgcgctgaacaggatcgccgtgccggcacgctcgagctcagtgccctgcagcccggcgtcggagagggtcttcagcgccttaccgagctcgcatacgccgcggaagaccttggaatcggcacccgcgtggggcagcatggcggagtggaacgcctcggcgcccgacttggattgccgccattggaaaaagcagatggcgtcggcgcccatggccacgtgggccagggagtcgcgcatgagttcgccggcccgtttgcgtgtgttcagcggcttccactgcacggctgaggtggagtgctccatcacgtaccacggcttgcccagcgcgagggagtccatgagcgcgtccgagcaggcgagttcgtccaggtgggattcgccctcatggaagtagtgatcgttggacacgaagtccacctcatccgcccatttggcgtagttcatgacgcactggtcggtggagaccatgaagttcgtggtgaacggcttgtcggggcagatctgctcgatggcgtcgcgttcggctttgtagaagtcgagcagcatgtcgttgccgaaccgctcgtaatccaactgctgcgacgggttgaccatggcgtcgccgcccatgtgacgtggcagcagcacctcgtcgaaactgttcacgtgctgcgaccagaaggccgtgccccacgcctcgttcaacgcgtcgatggtaccgtacttggcctcgcaccacgtgcggaacgcggccaaggcgttgtcggagtagtcgtagcggttgttccagccgtattcgttgcccatgtgccaggcggtcacatacgggttgtccttgtagtgttcggcaagtctgcggcacaggcgcagcgcgtattccttgaacaccgggcttgttggctgccacgactggcgtgagcccgcgttgacggtatgaccataccggtctaccggcagcacctctggatgggattcgtacagccacagcggcgcggcggctgtggcggaggccaagtccacggcgatgccggctctgccgagcctgtcgatcacatggtcgagccactcgaacgtgaacgcgccctcgaccggctcgatcttgtcccagctgaaaattgccagcgatacgacgttcacgccggcctcacccatgagacggatatcctcgtccagcgtctcctcgggccactggtccgggttgtagtcgccgccgaacgcgatgccgcggccggattccgtcagcagggacggccacctaaatgctctatgagtagtcatattaatcaaatcctttattgtatcggtttgcgggaagtgctgtgcttgcaggttgtgaacaccagagaggccgcccccgctggcggggctgtcagcgaagctgactgggggtggtcgccagtcgaatccccatatgaccaccctcagtccgctccgcggccagctcccgtcagagggagccagaggttactccttgacggcgcctgcggcgaggcctgactgccagtacttctgcaggcacaggaacgcaatcaccagagggatgatcgtgatcagcgaaccggtaatcacgaggttttggatagcttgaccgcctgcggttgaagcctggtccttccactggttcagaccgatcgtcaacgggtaccagttggaatccttcaacatgatcaacggcaggaagtagttgttccacgtcgctacaatggcgaacaatgcagtggtcacgatgccgggtgccaacagcggcagggaaatctggaagaaggtgcggaactcgccggcaccatccacgcgcgcggcttcaagcagctcatccggcacggcctgatcggagaagatccacatcagatacagaccgaacgtggataccaaactcgggataatcatcgaccacggggtgttcgtgaggcccatcttggcgaacagcaggaactgcggcacggccagcgcgatacccggcaccgaaatggcgccgatgatgatcacgaagcacagcttacggccggggaagcggaacttggccagcgcatagccgcccatgatggccagcaaggtggcaccgccggcgccgaccaccacatacagaatcgtgttgacgaaccagcggccgaagataccgtcctgataggtgaacaccgtggcgatgttgtcgaacagggcgaacgttttgccgaaaccgaggccgaacgtcgaagtgaagtcggactgggtcttggtggcgttaatcatcaggtagacaaacgggaagaggcagtagaccgcgaaaatcgcgcacacgatggtcagggccatcgagcgggtcgggttcgccgggttggagaaaccggttttggcggcgcgcttgcgctcggccttctcgtcggcgtcgatgcgcttctgacgctccttctcggccttcttggcggccttttcctgagccttgagatcggccagggtcatggttgttgttgaagtcatggttgcagtgctcataattacttcatctgctccttcatactcttaagctggacgacatacgcaatggccatggtgatgatggccatcacgatggccagagctgcggcatagttgctctgattgccggtgaagctcaggttgtaggcgtacatgttcggcgtgtagtacgtggtgatcgcgttgcccggaaccatgttctgcaaaatgctcggctcgttgaacagctggaagctgccgatgatcgagaagatcaccgtgatggccagcgagcccttcagctccggcagcttgatcttcttaacaatctgccactccgaagcgccgtcgatggaggcggcctcatacaagctgtgtggaatggtgcttagggagctgtaaaaaatcagcatgttgtagccggcatattcccacgtgttgatgttcgcgatggatgcaagcagcacgtcggggttgagcacatcgatgttggtgccgaggaagtcgttgagggagccgaccagaccgtatttggcgccatacacgaaaccccaaatcatggtggagaccactgcgggcaccgcatagggcaggaatgtggagatgcggaagaacttggtgccatgcagcttcatcgaatccaaagcgagggccatggctgcggccagaaacagcatgatcggcacctggaatacggtgaagatagtgacgcggcccaccgagctccagaactgcggatcctgaatcagtcgggcgtagttctcgaagccgacgaacttggtgccgccgaccatctgcttcttgaagaaggagatgtaaatggcgtacacaattgggatgatgaacacgaagacgaacaccacggcgaacggccacatgaacttccagccgcgccagtcggccttgtgcttgttgacgcgggcctcggccgtgtgcagatccgcctcctcaggcaggattcccaccgttggctgcggggctgcggccattgtttgatcggacataatcgattgctttcttggaatacggattgctgtgctgcgcccgctaccagggggtcgctcgattggagcggtcacgtcaggcgagggcacgggaaagcggggacactggggagcatccccgctttgggagatcgggcggctaggcggaaggagagtggcctagccgcaggttttgattgttggtcagtgccggatgtaccggcaatagatcggttgcgtcacttgacggtgacgttgtagccctgctgcttgccttgctcggcgagcttgttggcatagttttcaagcgccttctccagggtgatgtcgccggagtaggccttggagacttcgtcgccgtaagcggtctgggcgtacgggttgtacggcaggtactggaacttctcggtcgggcgctgagccgcggcggaaaggacttcgttgacgttctgaccgccgaagtagtcgttggtcttcttgttggactcggtggtcgggtcggtgaaggagtcggaccggaggatcttcttcagggacgggaaggtaccggtgtcggccatggtctgagcgccctcgccatgagtcatgtactcaacgagcttgtaggcagcggcctggttcttggactgcgaggtgacggcaagtgcagagccaccgtcttcggcggagacttccttgccttcctcccactgcggcagctgggcgacgcgccagttgccggcctgatcgggggcgccggtcatgaggttgatcggcatccaagcgccgatggtcagggaggcgagggtgccatcgttgagctcgcggttccaatcgtcggaccagttcggggtcttggcgtccacgaggtcttcgtcgatgagcttctggacgaattggatatagcgctgcatgccctcgtccttggtcatgttgatggtgatgttctcgccatcgaccttccacggctgggcaccggcctgccagatctgggcggtgaacggctgatagtcgttggaggtaccggccagattggtgatgtaggagccggtggcacggatcttcttggcggcctcgtagtagtcgttccaggtcttgatggactcgccgtccacgccggccttgtcgaacactgccttgttgtagaagaacatttcggggccggaatcaatcggcagagcgtacggcttgttgttgtactggagcttgttccacgggccggcggcgaagtcgtcggcgagtttgtcggcgccgaattcgctcaggtccacgaggccatcggtgacggcgaactgggtgacggtcggatcttcgagcatcacgacgtcaggggcgccgttgcctgcggcgatggcgttggagagcgcggtggaggtcttctcggcggtgccggtgttgttgaacttgacggtgatgccggggttggccttctcgaagtcagcgaggatttccttcatcgagttgccggaatcccagccccagaacacgagttcggccttgtcagcgtcacccttgttggcgccgttgtcgttgctgctgccgcaggcggcgagaccgacgagcgtggccacggctgccgttgccgcgatgaccttcttggtgttgcgcatgttatctccttctggaccattggagttgacttgcgggtggttggctttcttccgactggcttccggttttcgtccggttacttctcggttatcttccggctgtctttggctgccttccgattgttgacgactgccttccgattgccaaaaacgaatcgactgctgcgttggatttcaattcgtttggccgcttgcgaagtctcctctggccacctttccttggggtgttttctttggtacacccgtgtaccaatacctaagatgatacacctgtgtaccaatttgtcaaatcacccgacacgcctgatttttttcgccttttccatgctttccacgtgagcaaatctccagtcgaacagcgacttgtctcagaggctcttcatcccctcccccaacgtgagtaggtcccgactctcagcacaccaccaaataacgcgcagcatgctcgtgagtccccaacacccacacaccacggcgcgattccaccactcagccgcctcaccagtgcccacatttgtagatattcaacgccatatgacaagaatctgactagtatgaacaggccccccatagctgtattgagaggaaaaagcacatggcgggcctgtttcaagctacttccaagcagcgcaatcccttgggaccaaccatacgtactcacggatcgggcaaatatacgttcggtctggccttaagcgccggtcaatatccgcggtctgcttgccttttcctatcagctcctcgcggtatgcggcatcttcctgaccaatgtcatcaactacatcatcgcctcctacggttccagaagctgggatgtcaacgccggttggcgttggatgctgaggctgggtgcgattccggccgccgcgttcctgctctccatggtgcgagcaccggaaagcccacgattcctcattcaagccggcaaaaccgaagagggattcgcggtgctcgcgcacatcatcggcaccgaacaggcacgccttcgcactgacgacatccatgcatcggtcaaactcgaaaccgaaatgtcgcatgaatctcacgacctgttccgcccagggctgcagaaggcgctcatcatcggcactttgatcaaggcgtgaatgctgcgttgcgttactgcattgccatgttgccatgttgccgcgttattgcatcgctacgttgtcacgttgccgcgttattgcatcgctacgttgccacgttgccacatcacattgcattgccgcattgctgcgttgccgcatcacatatcgcaacacaaacgcagcaacgcaatgacgaccggagatggcatcgccgccaccagcgaggaaccgcaatgcaacgcggtaacgtaacgcaatgcgatgtgattcccgcgtagttacaggcagttacagattgagtaccgcatcagcaatgcgcatggcggattcgcggtgggagaccagcaccacagccgcgccgcgctccttgtctgcatgctgctcacccacggccatagcgtgaatggaacgtagaataatagcctcgttcaaagcatccaaacggctggtcggctcgtcgaaaagcaccagatcagcattgcgcaggaacacacgagccaaaccgatacgctggcgttcaccttcggatagacggtcgcccagctcgcctacctgagtatcaaggccatcgggcaaggaatcgatgagatcaagcacggaggccttggcgagagcctgacgcaaacgagcatcgagaccgtcagctgctgccacctgaacggcatcgccctctgccgattgcgccgccaaccgctgctgtcgggaatcaacggtcttggcacccacttccccattgcctgcaacatttgcagcttcaacctcggactcagacaaagcaatcagcagattgtctcggatagagccatcaaacaggtgggtttcctggctcatcatggcctgaatacgtcggcgagcatgcacatcgacctcgggcaacggcgtgccggacaacgtcacctgaccgcgctgcggatcccagtagcgcagcagcagcttgagcatggtggacttgcctcggccggacggcccctggatacccagcacgccatgctgcggcacgtcaagcgagaagtcggacaggacttcatgctcccccgcatatgcaaaggtgacgtcatcaagacgcatgcccatatactcccgcggcacaacagtgccgttctcggtcacagcgggcacctcgtccatcagtccgaacagtcggctagcggacgcgaaggtctgagtcaggttagcgggcaaggcggcgagcgccaaagtcggtccgaacgagctggcgaacagcacgaaggcggcaatcagagccggaatgctctgcgggttcgcgccggcacaggcaatagccacggcgaccgaagccgctgtgagcacagccaccaagagtccgctgattccggtgaaacggccgttgaccttgctgagtttggcgtgatccttccacaacgcatgggtacggtcctcgatggcctgcgcacgctcctcgccgcggccaaatcggatgatttcgtccaggccgcgcatgtcatcgagcatcacattgtcgagttttccggcagcgccacggatggcagggccaaggttacgtacgccggtggcaaagaatcgcggcacaaggatgccgataaccaggtgggcggcaatcaacgccagcgccatccatgggcttagggtggcggccacaatcatgtagatgatggtggaggttaccgcgatggccaccggactgatggtgtgggcaaagaagatctcaagcagttccacatcggtggtcagcatggcgataaggttgcccttacctttgcccgcgagcttggccggcgccagtctgcgcaacgcggcgaacgccttggaacggaagagtgcgagcagatggaatgccacattgtggttcagatattgttcaatgtatcgggtgatgccacgcagaagagcacagataatcatcatgatgacggcgggcgcaacacccatgccccacaccggattaccggtaagtgcaaatgccgcgataatgccgaacacgggcaggaaagtggccgaaagatggccgatggtgccggcggtggaggccgctgccatcagtcctgccagaggtcgggcttccttaagcagtcgcctgatcacttggaatgtgctcattttggaagacgaatcgctatttgcaacaccagccggagtctcagccgaggcctgctcactcccgccaacggaagccgtcggcaaagctgactgcaggcggtcaaccgtcatacccgcctctgcgcttacgcgcgctgcgccaccctcagtccgactgtcgtcggacagctcctgcttgcgggaaccaacctgcagcacacgccgagcatggccttctccgaagttctcaatatctgcctgcgtggtaaacagcttggcgtagacgccgtccgccgtcatcagctcggtatgggtgcccctctcaaccgacttgccgtgttcgagcaccaccacttgatcagcgtgttcggcgttggccatgcgatgggtgatcataataaccgtcttgccgcgggattgcgccaattcgcgaattgtatccaggatcagctcttcggattccatgtcaacgctgctggtcgcctcatcgaacacaaataccggcgaatcatgcaggagcgcgcgggcgatggcgatgcgctggcgttggccgccggacaggttggcggcatcggactcaatcggcatgcccagtccgttcggctgtgcgtgcacgaagtcggcaatgcgcgcctgctcgagcgcggaccacagacgggagtccacggaatccggcgaatcaggaatctcgtcatcgggcaaggccatcagaagattctcgcgcaatgcgcccgcaaacagatggctgctggcaccaatcacagtgacggctccggccagtgtttcgcctgacaaatcggatacctcgacaccgttcagcgtgagcgaacctcggtaaccggccagtgtaccggcgagcagcgaggcggccgtggacttgccggaaccggagatgccaacaatggcggtgaactgaccgggccgtgcggcgaaggtgatgttggtgagcgcaggagcgacggcggaattggggctggtttcaccttgcttatcggtctttgcggatgcggacttggagtcgccgtgcccggcatcatcataggaatagccgacgtggtcgaagcggaccgtcagaccgtcgtcagcggaatcggaatcgttggccggcagggtcgccgtgccatgctcgggctccggggtgtccagcagagcgaagatgcgcttggtggaggtcatgccgttcatcgccacgtggaagaacgagccaagctgacgcatgggaataaagaattcggcggacagcagcacaatgaacagcagaccggtaagagacagcgggtagcccaccccgaacgggatgagatagtgcaggccgtatgccgcgtaggcaagcacaccaggcagatgtgaggccagtgcgattggcgaccagccggacgcaccattggcaaaagcatcgccaatatgcgcgtattgccataacgccacaccgatgccggccgcagcaccgccgtaggccactatgtccatggcggtcagcgagcgcagctggatctgcagcacgcgcatggtcatgacgcggaagccttcggctttcttgtccatctcgatggcggcgcgctcgtcggcgtcgaagtttttcagggtctcaaggccttggagattgtcgaggaacgcggcgcccatatcggtgtagcgcacccagtacttcttgaaggcgcgggcggcggtcatggagacgatgccggtcacgatgatgatgaacggcgcgcagaccagcatgacggcagcggcgggcacgttaatcggcgcaatggccacgaacaaggtgattggcgcaagaatcgcatagaagagctgcggcaggaacagttcaaagaagctttgaatctgttcaacaccttcgccggcggattgcaccacatccgaggtcttgatgcgggttttgtaggacgggccgagtgccaccattttgcggtacagcttggagcgcaaagcgagcttgactcgttcggcggcttcggtgccgagacgggtggcgtgcgtggtggccgtgtaacggaccgctatacagaccagcgcaagcagcacgtaaatcatgacgtcgccagccatgggcagcacatccgcgccgtgccgatcagacaacggcacggggcaggccgcgccttgcgaagtgccgccgcattggagcagcggcggtgccacagcggtcagtaagctgttcagcagcattaccagcgacagcataaaaccaatgttggcaagcagacctacccacatcagggccactttgccagctatgagttttttcaagccaggcgccaattggaacagtcgtttgtcgaacatggtccgcttccccttgccgtgttgttgcggtgtgccctcgtcatgtgtacctgcgctccacattccgcgcaatcccattcaccttaagcgaacgccctcgcacacgccagacttttaaagtgagagaggccacagaattatcgattgcggagtgcgcatgctagacgcgccaaccaaaaaaatatgcttcgatatcaggggctgaagcatccactacacccaatacgtgcatttatccgtttcgaggaggctcatttttgcgtttgccggaggcctacttccgtttcaaggggctgatttcgcatttgccggaagtctatctccgcttcgaggggctcctcatccatgtaatcggaagtataaacggctacacgtcaacgtcattccgccgttttagggccgtgtctacttgggcatcagcccctcgaagtggaagtagacttccagataaggcaaaatcagcccctcgaagccgagaaagcacgtttctacggtgtcagaagccgacggaacgcaaaagggtcgtctgcacgcagacgacccatatgatcaattcgccaatagacgcagcaaacgcggcctagtgctgctttttgcgcggcgaccagtgcttcggcggcggccgtacttatcggacaggaagccggagaagccggcgccgatcacgccgccgatcatgatggagctgatgaccagaccctgcagggccgggctcagcgcgtacttgtcctgcaggaagtcgatggctcccgaaatggacacggtgtcataaccgtagagcaaaccggttagacacggcgttgtatacaatccacaaaaccagacagacaacttctccattgcccacaacgcgcgcaaccttacgccagcgtaacctaacttgtcagaatggctcgattttgtcaacagccatcacgcaacgcacgtaaggacacggcccgcttatgcttgaccactacaccacgcctggcgaatccatcgaaatccgcgacaaccagaccatctactccctacttaccgatcgccttgcccgcaccggcgcggacacggtaatcgccgccaagaaaatcggccccggccgctggcagaacgtcaccaccggcgaattccacgagcgcgtggtctcggccgccaagggcctgatcgcgctcggcatcgccaagggcgacgcggtgaccatcttttcctccacccgtctagaatggggcattctagatttcgcactggccgcggtgggcgcggtaagcgtgccgatctatgacaccgactccgccccgcaggcccagcgcatcatgaacgattcggtggtcaagctggcctttgccgacaatcgcgagcgcttcgaccggctcgactcggtcaaggaccactgccctgccttgaagcagattctcatgatcgagggcaacgcgctgggcgctttggaaggcctaggcgtgaccgtttcggacgaggaactgcacgagcgcgtggccaccgtgcgcacggacgacctggccaccatcgtctacacttcgggctccaccggcaacccgaagggtgccgaactgacccacaagaacttcgtgtccatcaccatctccgcctcgcaggcgttgcatgaagtggtgcttgacgaccatccgcgcctgctgctcttcctgccgctggcccactgcttcgcgcgattcatccagtacgcctccatcgcctccgatgacggcgtggtcggttatctgccggacaccaaaaccctgctgccggacctgcgttcgtttgaaccgacctacctgctgggcgtgccgcgcgtgttcgagaaggtatacaacgccgcctcgcacaaggccggtgccggctggaagggccgcctgtttgtcaaggccgccgaggccgcgcgcgtctggagccgcaaggagcaggccggcgagcagcacacgtttgccgaaatcgccgagcgcgccaagtacgaaacgctcgtctaccgcacggtgcgcggtgctctgggcccgaagatcaagtacgtggcctgcggcggcgcaccactgtcgctcgatctggcgcatttctacaacggcatcggactgccgatgattcagggttatggcatgaccgaaaccgccgccccgttcgccgccacgcgcgtgaccgacaatgtgatcggcaccgtaggccagcccgcgcccggctcctcgattcgcatttccgacgaaggcgaactgcaggtcaagggcccgaacgtgttccgcggctaccacaatctgccggagaagacggccgaggcgttcaccgccgacggctggctcaggaccggcgacttggccgagatcgatgatgagggccacatcgtcatcaccggccgcatcaaggacattattattactgccggcggcaagaacgtctcccccattccgctggaggaagagatcgccaagtgcccgatcgtggagcactgcgtggtggtgggcgaccagcgcccgttcatcggcgcgttggtgacgctcgatccggagtcgctggcattgtggctgcccgcgcacggcctgtccacggagacgccggtcgaccggctcgccacgaacgccgcggtgcgcgaggagattcagcagtacgtggacaaggcgaatgcgacggtctcgcgcgccgaatccgtacgcaagttcgccgtgctggacacgcagttcacgcaggagaacaagtgcctgacaccgtcgctgaaagtggtgcgcccggccgtcaatcgcgtgttcgccgatgtgatcgacaacgagatctacaacggcaagcggtgagacgcgcggttcgtaatccgacacaaaaaaagggccttttgaaccgcaccccgattgttggactggagtaatccagattcgatgatcggaggtgcggtttctcatgtccagggatcgcaggcgtcattatgacgatgattccatgcgggtcgtcgccggggtgccgcccggcccaggtgggtcacgcccgggtcagtttcttgctcctgagacgcagcacgacatcggcggagttggcgacgcgcttggaatgcgtcaccacgatcacgcatttgccgagctgatgggcggcatgctgcagcagatgaatcacctcgtcggtcatctccgggtcgaggctgcccgtcggctcgtccgcgaggatcgcgcggcccggggcgaccagcgcgcggccgaccgccacccgttgacgctggccgcccgacaggtgcatgatgttgcgcttggattcctcacggctcaaacccagttcctcgaggatcttcatatcggccttggtgctgaccagccgcaggttctcttcgggggtgaggtagtcgatcaggttatggtcctggaacaccagggacacgtgctcccgacggtgcttcgcatagcccgatgcggcgatgtcctccccctcgaagcggaccactccccgggagggggcgtccaggccggccagcagagacagcagcgtgctcttgccggcgccggacgggccggtgatcgcatacatcttcccggattcgaaatccgcgctgacatccgagagaacaaggatcttcgccgcgccgtaggcgtaatcgacatggtccagttgcagacagttagacatgattggtgactcctaacgcatagaggaaagaatggatttcggggatttggacagcacggcggcgcatgacacggcaagggccacggcgatgaccgcgcatccgagcagcaggatgagcaccgtctgctcaggcggcaaggcctccacgtgcaacgattccaatggcgcgacgcccgaatcgcgcaacagtcgggaagacacgtatcccgacagcatggcgccggtgcccagcgaacacagggcggcgaccgccgccatgagtccggtttcgatggcgagttgtgcgactatccgcatcttgccgatgccgagggccagaagcgtgcctatctcatggatgcgtgagcgaatccagaagaccagcgccatcgccagcaccagtacgtccgcgaggcagacggacagcagcaccatgcgcaccagatcacgcaccgtctgcacggattgcaggacgccggagagccgggccgaatcgtcggtgacgtcgtacttgccaccggccatggtcttggcctgactgaccgccgcggacaggtcctgcggattatccgacaggcatcggatcatgccgatccggtcgtttccggtcagagcggaggtcactcgcctgcccgaatagatgaggttctcggaagtgtccgagggcagggggctttgggcctgcacgttgccggagaagatcccggccacacgcaccgtggcgttgcgcccctcctgccggagacggaatgtcgagccgaccgataggccgttctgcagcgcgaagtcgcggtggaccagcacatcgtcgccgtcgcccgagatatggcggccctgctccaggcggtacaggccgctctggaattcctcggacaatgaggaatcggtggtgcccagcacgctgacctgcatggccagatcggagtccaatcgggggccctgccgaggcatgaccgggcgcgcgccatccacctgcgccaaggtcttcgtcgcataggcggtcttcgtcacaccggggatacgcgagaaccggctcgcctcctcggcgctgatgggattctcgccggcgctgacggtaaaccctatgcccatgcccgcgccgatgccgtcggacatggtacgcagggccgtcgagactccgacctgcgccaccaggctcgtgaagaccatcagcatcagcagaccgatgatgccgctgcgtaccggcttgcgtacgatcgccaacgtggcacgcttccacacattcatgctcatcatcgaatctccgacaggtctcgcggcgatttgcgcagcatcggcatgcacgccaccgcgacgcacaccagcatcaccgccaacaggccgagcgccacgtacagcatggcggtcccgtcgaccgacaccgtgagcgaatccagggtgcgcaccgacatgctggattcaaggtcgccgccgacctgccccatgctgctcagctccttcgccgcggaggcgttcacggaatggagcgccgtggcgccgagccattgggccattccctgcgcgcacagccagccgagggcgagggacggcagaccgatcagcaccatctcggtgaggtattgggcgaccagggagggcttgccgacgccaagggacaccagtatgcccatctcttgacggcggtcgttcatccacagcagcagcatgagactgagcacgagcacggccgagacggtcacgccgatcagggcgccgcgcatcatggagcgcacgccgcgggcggcatgcagcatgctcgatgaatactggtcgttgcgcgtgatctgatagttgttccaatccaccgggagtttcttcgcggcatccatggtcttctccacgtcaacgcccttggacagcacgaaggtggcgtcctggtatatttccttgccgtccttgtactggtacaggtcgcgtgtggtatccagatcggtgtagatggtgttggcggtgagttccgctcggctggatacctttctggcgctgtcgcccttgaatatgcccacgatggtggtcttgacggtcgccgtcgaatgtgattcgttgtcggcgtcataggcgttggccttgagcgtgagcgtgtctccgactttgagcccgttggctttggcgagatcctcatggatcatcgacgtatacttgtcggaggccttcagatgtcgtccttcggccatgccgagcgtgcgcgacgtgaacacgttgagtttcgacgaatcattcgtgcccatgacgttggcggcgttgccaaactgctgctcctgggtcgcatcgtaatcatcgccgccggggaccttcgccacattcgcccccacgagatcggcggtggcgttctgacggaccatatacgaatcgaccccgggcagttgggcgatcctgcgcacgtcggcggggcgcaccatgccgcctccgcgaggcgtgagcatgctgccctgcatgttgctggacagcacaaatccaccgaccgcttccttctcgattcgtccggcggcctgttgagctgccagagaaaccgcgatcgtggatagcatgctcgccgttatgatggtcagtattataaggagcactatggttcgcactcgttttctgagcacatagcgcaccgaccgtgcaacgaacgtcatcaatacctcctgtgggacttgggcttttcgcccaaaatgcgaaacatgccgcgtttcgccgattagttagccgcgacgatacatgatgcacctcaagatacgggagatatacgccttgagcgaaaaacggaacagcggcgaatgtcggttattctggattttggtccatctcgggccgcgtcgatgcgtcggcccgcgagaaatcaggctcgcgcctcaccttcgaggcggcgaacacaagaagcggcagagcggcgaacgcatagttctcgcattggatgtacaggtatgcgaccaggacgagccagcagatgacggtcttgtgccagacgccggattcgcccgaacccgcgccggcaacgccaccaccactattacccccggcaacatcagcaacgtcggcaacgtcggtgacacaaacaccgtgcgccagcccgtcggacgatgcgccatccgcaccgccacggcataccgtcctcccgcgcgtcatgcagaccatcgaggctccgaccagcatggccagcccgatcagcccgtattcggcgatgacgctggtatacgcgcacatcgtccacaccgtgtccgcgttcacgccggccgcgaatcccgtggccgcgccgccgttcatgccaagaccgtccagcagccgtccggttttggccgcgccggcccacaccgcattgatgatgttgcccgcgccataaccggtgagcagcgtccacggatgggtgagcaatccgcatatcggatcgaggttttggtagatccgcgcgaagaacgagccgtctccctcggccccgttctccgcgatggcggagagtctggaatccgccagcacacccagcaggcccagtgcgcatgcgccgagaatctgcagcatgccccggacgcggcgtgcgccgtcatgccaatcggtgcgcgccacaagggcgatcagcaacgccacgacggaatcgatgacgattctggtgccggcttgcatgagcaccgcgccgacggcatacgtgacgatgaggtcacgcagccgtttggcgtagatgcggtcgcgcccgcgcatgagccacatgagcggaagcagtatgccgaacaggtgcatgccgatatagctgggctcggcgaacaggaactgcggacggccgccgccccacaccgagttgtcgctgatgtattgccggtacatgaggtgcgagaaatagtcggtcaacggtttggcgcgcagacggatggacagccattgcacgacgcccactccgaaggaaacccagtatgatgcgatgagaatccgcaatggcgtacgccacggaatgcgtttgatgtcgaacgcaagggcgatcgcacccaaagtggcgagcacgcccagcaatccggtgatgctcatgaacgcggcgttgaggtggatgccgaacttcagccatcccgggatggacaggattatacagaccaccggtaggaggaacattggcaggtaccggttggctgcgatgcgcagttgccgccaattgcataggcagtacacggcgaacagcgccggactgattggcgaccagaacggcgcgtacaggccaagcgtggtgccgtccaccggaagaaaagcgacggccagcaacagccaaatgacgttgcgttcctgcgatgtcagaaatcgcaggaacgaccggtattgcggtcggccatgatggttgcccgcgtcgatggtgtcgttgcgtacgcatgcctggttcatgtgattctccctccccgtcaaccttactcgttcatcatgatgcgcggacaggggcatgctttccccgccgaacgtgcaatggcccgaacattgacaaggccgcaccgaatgccccccatcattggcacattgtgcaatctcgtcgcgactggctgacgaaataatgttggccgaccggttacattggttcggtacagtggcggcattattggccactgaatcaagcgatttgcggcagaacgacgaaagcgacacttgggcgaaaagaggcaggcatgaccacgaatcgaccgctcattgcggtgactccgctgatggattacgggcgcgatagtctgtggatgctgcccggatatatggaggcgataatgcgggccggcggtacgcccgtcatgttgccgctgaccgatgacaccgacattcttgcgcaatgtgccgaacggtttgacgcgtttctgtttacgggcgggccggatgtgggaccgatggttggtgcagcggcctccgccaccggccgtagcgaggtgctctctcctgagcgcgaccgaatggaatcgattctgctgccagctgtaatggcttgggacaagccgattctgggcatctgccgtggcattcagttcatcaatgcagcgctgcgcggcacgttgtggcaggatctgccaagccagcatccgagcgatatcgaacaccatatgaatccgccgtacgatgcgttcggacataacgtttccttggtgcccggcactcccttggcttcattgttctcggggcagactgagattgcggtgaatagctatcaccatcaggcggttcgtgagcctgctgctggactcgaggtcatggccgtcgcgcccgacggcgtgatcgaggccctgtaccggccggcaagccacttcctgtgggccgtgcagtggcatcccgagtttctctacaaggtagatccacgctcgcaggcgatttttgatgcgtttgtggggagttgccgataacagcaaaaggggctgctccggtttcccggaacagccctttttcagcggtagcagtcagcagactgatttagtcatcggtgctggcttgccaacgctgattggcgcgtgcggagaccgccgtccgaaggcgaaggcgcacgaaggtacgtcgaacctgaggaaaggcggtatacgctccgccaatcagtgctggttgttgagacggtggtacatctcggacagctccagttccttctcgaactggcgagcggtggtgttctcgtcgatgacggcgagctcaacaccggcgatgcgggcgaagtcttcccaagcctcacgaccaacggaggtggtcatgcaggtgtggtgagaaccaccggcggtgatccagcactcaacagcggtcttcaggctcggcttcggctcccagacggcgcgggcgcacggaagctccttgagggagccctgcggctcaacgacgtcgacgacgtccatgagcaggcggaagcgttcgcgaacgtcggacatggagaccacgacggcgtccttggcgggcttgccggagaagaccaggcggaccgggtcggccttgccgccgatgcccagcgggtggatctccagcttcggcttggcgatggtgccgatggacggggaaacctcgagcatgtgggagcccatgtcgagctcgtcaccctcggtgaagttgtaggagtagtcctccatgagggaggcgccaccctcaaggccgtagcccatgacggcaccgatgcgcacgaggacggcggtcttccagtcgccttcagcggagaagccccagccgtactcggacgggaagcgctgcgggccaacgcccggcagctgcggcagagcgccgaggtcctcgaagttgtcgacgccggcggtgcagccgttggcgcgcatcatgttgaccatcgcggcctcttccttggcggcgatgaacagggagtcgtacttggcgtccagcagagccgggtcgacgtcgtacttggccttgtagtcctcgatgatctccttgacctggtcgtccttgacggcgtcgtacgcagcgacgagctcgttgacggcccaagtgttgatggaggcgccgaacacgcgctcagcctcggtcttgtcgccctcggtgacggcgacgttacgcatgttgtcgccccagcgcatgaccttcatgttgttggaggcatcccagccggcgcaggcgcgggcccaggtgccgagcttctcggcgacctcgggatcggtgtagtggccgacgacaaccttgcgcttgatgccgaggcgggagacgatgtaaccgaactcacggtcgccgtgggcggcctggttcaggttcatgaagtccatgtcgatggtctcccacgggatttccttgtggtgctgggtggccagctgcagcagcggcttggtcagcacttcgaggccgcgaatccacatcttggccggggagaaggtgtggcaccaggtgatgacgccgatgacgttcgggttggcggaagcctcgaccatgaactccttgacaccgtcggaggacttcagggtgggcttgaggacgatcttggccggaatcttgccggtgttgttcaggtagtcgaccatttcagcggagtgaatggcgacctggcgcagggcttcttcgccgtacaggtcctgcgaaccaacgccgaaccagatttccttgccctcgaaggggttttccataaccatagggttacttcctttacttctttgtttatgggggtttgtttaagtttcattcgccgaccgaggctcccctcagtcagctatcgctgacagctcccctcagagaggggagccaagacaccaccgtgctggcggagtcagcgctgatttgatgtgtgtgtccgcaaggcgcggaaggcgaaggcgtacgaaggtacgtcgggccttccgtaacgcggcggacactccatcaaatcagtgctgaccgtagacgttctggtagcggtcgttgagcttatcgatgtcggcctggtcgatctcgatgatgtcaccgagctgacgggcggcccacatggtgtgagcgacttcctcggtcatggcagcggccttgacggcgccttcagcatccttgccgatggtgaaggggccatggttctgcatgaggacggccggggacttcgggtacttcttgagggtctcgacgacacccttgccgatcgcctcggagccgatcagacggaacgggccgaccggcaccgggccgccgaactcgtcacccatcatcgtcaggccgcacgggatgttctgaccagtggcagcccaagcggtggcgtaggtggagtgggtgtgcacgacaccgtagacgtcgggcatgttgcggtagatgtaggcgtgggaagcggtgtccgaggacggggcttcggtgccgtcgaccacgttgccgtcaaggtcgcacacgaccatggaggacggggtcaggtactcgtagcgcaggccggagggcttgatgacgaacaggtcggcggtgtgcagacgctgggaaacgttgcccgcggtccacacgaccaggttccacttgatcagctgctggtgcaggttggagacgacctcacgaacctgcttgacctcggcgcgaacctcggggccgtaatcagccaaagttgccattattggttttcctttccactgtgatggatggacgttttttcaaaatctcaaggacctccctcaatagagggaggtcagaaaggcttacttatcttcgaggttgatggtttcgatggcggcgtgctcgatgggcaggcccttggtgaagcgggcgaagaagtcctcgaaaccaaccacatcggaagccaccggcttctcagtggtggactgggcgtccttgaacacgcaaccgtcaaggaagtcagcgaggttgctgtgatcctcgttggtgttccacaggtagttggcgagcacggccatgccccaggcgccaccttcggcggcggtggacatgaccttgatcggggtgttgaaggcagcagcgagaatcttctgagccaccttcggagtggcgaagatgccgccgtggcccacgagagagtcgacctgcacgcgctcctgcttggtcatcacgtccatgccgatcttgaccggggagaacgcagagaacagctgggcgcgcatgaagttgccgagggtcatgttggcttcggggctgcgggcgaacagcgggcgaccttcaggcagaccggccaggaattcgccggaacggaacgggtagttcagcaggccgccgcagttggcgtccacgtcgtcggcgatggccgcgcggaacagggtgccgtacagcatacctgcgtcaaccggctggccgatagccttggcgaactggccgaacaggccgacccaagcgttgaggtcggaggtgaagttgttggcgtggctcataccggccagatcgccggccggggtggtgaccaagtcaacctcagggtggagggccttgagcttgtgctccagaaccaccatggcgaagatggaggtgccggcggagacgttaccagtgcgtacgcgcacggagttggtggctaccatgccagtaccggcgtcgccctcaggcggggcgagcacgatgccgggcttcagggcaccggacggatcgagcagcttggcaccttcctcggtcagctcgccagccggagtgccggccacgagcggctcaggaagcaggttctccagcttccacggctgggctgcgacctcaggcagagcgtcgaacttctcaatgaatgcggtttcgtaagtgtgagtggtcgggtcaatcgggaacatgccggaggcatcgcccacgccgaggaccttcttaccggtgagcttccagtgcacgtaaccggcgagtgtggtgaagtaagccaccttggagacgtgctcttccttgttgagcacggcctggtacaggtgagcgatggaccaacgctcggggatgttgtactggaacagctcggagagcttcttgtgagcttcggaggtgttggtgttctgccaggtgcggaacggcaccagcagttcgccggcctcgtcgaatgcgaggtaaccgtgcatcatggcggagaagccgatgtggccgacgtgcgtgagcttctcgccataggcggtctcgacgtcgttggccatggaggcgtaagcggactgcaaaccgccccagatctcctcggtggtgtagctccacagaccatcttccagatgggaagcccagctgtagtcgccggaggcgatggtctggaagttgtcgtcgatgaggacggccttgatgcgggtggagccgaattcgatgcccagcgtggtcttgccagcgcgaatcttctcggcgatgtgggcgacctgctcggccgcgttgtcggttgctgccatatctttcctttgccttggagcgccggcgttgttatccccttccttggggagggtgttagcgctcacaatttccaaaaaacattgtaccgacaacccgcattcgacacaacttatgccgtgtcacgcatcataacggtttgataacagcgccaatttaccgccgaggagccggccccaaggaccgccgggcacgcacctcggcgggaatcagccccatgccgtgctgggtggtcaggaaggtcggctcgccgccctcccccagcaagcgcagcgtctctcgcatggcggccacgccgagcccctcgaaatcgggatgcacggtggtcagcggtgggtacatgttatccacgccagacatgtcgtcgaatccgaccacgctgatgtcttgcggaatccgaagcccatgctcatgcaacgcgcgcatgatgccaacggcctgattgtcgttcgcggcgacgaccgcggtgggcaacgccgcgcctcgacgcccatactcatcaatgagatgattcatgtgcgcatacgcctcagaggcatcccacgtatggcagcgcacgatctgtgaatcgatggatcgggaggcggcgagcttgcgccacgcatccagtcgggtgtgggcgtcgcgccattcattgggaccggcaaaatacagagccgatttgtgcccgtattcgcccagcaaggccaccactttggccattgcaccccactggtcgataccgaccagcgcagtgcgacgcttgttttcggtggagataaggcccaatccctcacgcacggtcatttggccgtgggtggcggtgacgatgacgcgcggctgagtgactcgcgcacggcaggcggcggcgaacatcacgtcggtcggagtcaggaagatgaaggcgtcgacgttctgctcgttgaaggtgtcgcacaggttgtcgaagtcggcctgcgcgcacaaggcctcgtggaccatcatcacgctcatgaacagaccgtgctcgcgggccatggattcgatggaggagatggaggaaatcgggccgaagaatttgaggcctccggcgatcagccctatggtgcgcgaacggcgggaagccagtgcgcgcgcggagttggaggggcggtagccgagttggtcaatggcggcctggactcgcgcacgggtggcgtcggaaacgtccggcgagtcattgatcacacgggagacggtttggtggctgactccggcgagcttggccacttcgaacatggacggacgtttgcttggcttgcggctggtcaccatattgcctaacctccccgctggcggccggcatccatgcacggccagtcttgtaccttaatcaatactgactttagcgcgtccacaacagttttgcgttagcgctcacactgtcgtgtcgcacgcggctcaggtcaggtgccatgagacacgatggagcggagtcggcccgtgttcggcgatggcggcacggtgtgcggcggaaccatagcccttgttatgagcccattcgtaggcggcgtaacgtgggttgctttgcgcgaggtcgaccatcagccggtctcgggtcactttggcgatgaccgccgcggtggcgacggtggcgcaatgctggtcgcctttgactttggtcgttatgtcggctggaatcggcacgtccggcgcgtcgaacgtgttgagcgccttggtgatgtaatcgctcggcccgtcgagaattccggcgactttgggcagagcgcgaacgcttcccccgcaatttccaatggattcccctacggagcctcccggacgaccttccacaatctcccccgcagactcccccgaagccttttttatcgtcgattcccctccaagccgtaagccaagttcgcgttcgacttggctgagcgcgcgcagggcggccacgccaagcgcgtaggtgatgccccattcgtcgatctcggcgttgctggcctggcctacggcgtaggccgcgcaccagtcgcgcagttcgtcgaaaatcgcctcgcgcctatgttcggtgagcattttggagtcggccacgccgtccggtacgccgaggtaggtccgcccggacagttcgacggcatcatcgccatccaacggctccaaatcacgggcccaaatggcggcgcacccgaccatcaccggaccggcgagcgcgccgcggccgacttcatcgaatccagcgataaggtcatagccctgggccgcaaggatgcgttccaagtcaagtgtcggggtaatcatgcgcggctcccatcgtctcacaatggttaggattcagacggttcaggattcatatggttcaggattcagacggcccggaactcaatcagttcaaagactcacacggttcaaaaaaagactcaggaattcgagccggaagcgtcaggcacgtccttgaagacttcgtggtggtcatcaatcgcaccaagccggtcaagcggccagtatttcgcgattccgactccgaccacatcggagatgggaaccaagccgcgatcgccgtcatcctgatgatagcgggagtcggcggaattggcgcgattgtcgcccatgacgaacacgcggccctcggtcacggttaccgagaacgggaaggcgctcgggtccacgccggggcgaatgtaggaggtctcattgatggccacgccgttgatggtcaccggctggcccgcgcccttgcattcgaccacgtcaccgggcaggccgatcagtcgcttgattagatacccgccaccgggagcactgctctgctcctcgttcaaccagttgttgggatctttgaataccacgacgtcgccgcgctgcagatcgaagatcttgggggtgagcttgctggtcaccacgcgatcgccgggcaccgtggtgtccatcatcgagcgcgaaggaatctcgtaaaagccgacggcgaaaatgcgaatcagcaacacgataagcacgggaacgccgcaccacaggaaaaagtcgcgtagggtgaagtggtcatcatctgacgatgatgctgccgcggcattcgcgccagcggctgcacccgcgccagcggaagaagcggcgtgcgccgggcgcgccggtgccgggggaaccggggacagggcgatgccatggtcagcgacttggaacgtgcgggaatcgcgggcatcggcctcgtcatcatacgaggtctggttgctctccggattgtcggaaaccgggaattcgccgttatcctgatcgtcctgcataccatctcctcgcgattcatgctgccggatatgaggggtgccggcgcccgtccatcatacgtggaaaatacggaaacagcccgaaaccgaaacggttccgggctgaatttcacggtttattcgcgcacctgcatcatcaggcccacgattgcacccgcgaatcgactcacttagcggagttgtcgcggcgctcggcaatacgagcggccttaccgcgcagagcgcgcaggtagtacagcttggcgcggcgcacacggcccttacgcacgagcttgatggagtcgatggacggggagtgcaccgggaagcgacgctccacaccagtgccgaagctgatcttgcggaccacgaaggtctcacgcacgccagcgcccttacgagcgatcaccacgccggtgaaggtctggatacgggagttgttgccttcctggatcttcacgttcacgtcgacggtgtcgccgggacggaaggccgggatttcctcggccggcttcatgtgcttggcgtcaaaagcctcaacagcgttaaccattgttttccttcagtgctgccgcatatcagccacagatctggggccatccacgcgattgcgcatcgcgcgcgttgacctgttctcgttatccctcgagtttgcccttgggaagcctgccgatccgccaaaagccaggccttgcggccgttcggactggacccacggagacgcgggcttatgcggcggcccacttctcgacacagcaatcgattattgtacggattcttgcggacagtatcggcgtgtcgtcgtctctctccgttattaacgcatcagtttggccgaggcagcacggatggcggattcgaatactttccgtccctcctgctggtcgcatggataccgacgatggtattgatttggcgtttcagcgcacggcttgaagaaggtgagagtccgatggacggtgattattccagtagtttcgccgccggcaacagtcatagttgaggggggagcatacggagcgttccataactccctctcagtcagcttcgctgacagctcccctcagtattgaggggagctagaaaagcgaatcagaattcgcgacgtgggcagtcgccagactgcccaccagacagcacagccgcggtcgcgcgaatcacgaattctgaccgagcaaagcgaatcagaattcgcgatttgcgcggtagaacttgatcaggctctgggtggaggcgtcctgggcggcgagggcgtcgtcgtcctgggagatggccggggtgatctgcttggcaagctgcttgccgagctcgacgccccactggtcgtaggagtcgaggccccagacggtgccttccacgaaggtgatgtgctcgtacagggcgatcagctcgccgagtgcgaacggggtcagagccacaccgaagatggaggtggtcggacggttgccggagaacacgcgggccggaacgatctcctccggggtgccttcggcgcgaacctcgtcagcggtcttgccgaatgccagagccttggtctgagcgaagtagttgcccaggaacagctcgtgcacgtcctggtcgccgtccttggtcgggttcggggtgttgacgaacgcgatgaagtcggccggaatgagctgggtgccctggtgaatcagctggtagaaggcgtgctggccgttggtgccaggctcgccccagaagatctcgccggtctcggaggtgacgggggtgccgtcccaacgcacggacttgccgttggactccatggtcagctgctgcaggtaagccgggaagcggtgcaggtactggtcgtacggcagcacggcgtgggaagcaaccttgaagaagttgcggtaccagacgttcagcatgccgagcagcaccacgacgttcttctcgaacggggtgttggcgaagtactcgtcgatctcgtggaagccgtgcaggaactcctcgaaacgggccgggccgaagacgacggccagggaggtgccgacggcggaatcgacggagtaacggccgccgacccagttccagaagccgaacgcgttgttcgggtcgatgccgaactcctcgaccttctccaggttggtggagacggcgacgaagtgcttcttgatggcctcggccttctgagcctcgtcgccctcggcgatggcgccgttggcggtgagctcttcgagcagccaggtgcgggcttcgcgagcgttggtcagggtctccagggtggtgaaggtcttggagacgatgatgaacagggtggtctccgggtcgaggcccttggtcttctcggccaggtcgttcgggtcgatgttggagatgtagcgggcggagatgccagcgtcagcgtacggcttcagagcttcgtacaccatgacggggcccaggtcggagccgccgatgccgatgttgaccacggtctcgatcttgcggccggtcacaccggtccacttgccggaacgcacgtcgtcagcgaaagcgtagatcttgtcgagtgtctcgcgcacgtccttgacggtgtcctgaccgtcaacgatgtacttgccctcgtcttcgaccgggcggcgcagcgcggtgtgcagcacggcgcggtcttcggtgttgttgatgtgcacgcctgtgtacatagccttggtgcgctcatcgagcttgacggccttggcaaggttggcgaacagctggagggtttccggcttgatcaggttcttggacagatcgaagtgcaggtcgccggcgtcgaaggacagcttctcgacgcgctcggcgtcctcggcgaaccacttcttgaggctcacgccttcgacctgaagctcgtcatagtgcttctgcagggcagcccactcaggggtctgggtggcgtcaacgggcggattgatggccataggattccattcctttcatcagtgactggagcgcccttgcacacggctcggatgcgctccgtatcaccaaacagaatactcacaaattcggacatgaacagaacaaaatgagtcagcgatgtcggattgccatcgtttgcattatcgaacagttcacggcgcggcgcaaccgtcatcttcgactgagcggtcgcgacacaaccgccaatccgccgattggacttttcgctgggatgtcttatacttaatttcttgtgcgcggctggcgaaatgccttccgcgaaccaagccactttagctcagtcggtagagcggctcactcgtaatgagcaggtcgtcagttcgattctgacaagtggctcggatgccctaggctggtcggtctgtaatggctgtccggcctagggttttgcatatctcccacacctgtggaaacgcggatatgcacgcgcgagtggcggaattggtagacgcgcaggatttaggttcctgtgtctttgacgtgtgggttcaagtcccatctcgcgcaccggcttgagcctcttggaagcattggattgccaacgcttccgggaggcttttcgtatatgcgcgcggcagctgcaagcccttgcggacacctctacatatggcaatgccaaggcggcaaatataatgggccacagcattgcgggtctgagcctgtgcgccatgagcctgtgtgagtcaaggagagaagtgtatgtccgccattcttacgccggttggtctgttgctgatcatcctcgccggctatctgttcaagcggttcggcctgttcgggcagaaggattatcgcgtgctgcaaaccgcggaattcaacatcgtgctgcccggtgccatcgtatactcgttcgccaccaatccgcatgacatctcgctgctgcttatttcggtattcgcattcctgtttgcttttatcccgatcgtgttcatctttctggccacccgcaagcgcaatgtgaccgaccgcgccttcctgatgctcaacggtgccggcttcaatctcggctgtttttctttcccggtcgtccagtcattctggggtgcgggcgcggtggtgccggctgcgatgttcgatatcggcaactgcgtgatggtggccgccggcaccaatgtgctcacccagcaactgctgcatattcagcccggcaaaacacttgccgaacaacacgccggttcggctcccaccttgccgtacgaaaagcccaaggatcgcgacgccaaacggcttgcccgccgcgcattgctgcgcaccatcggcaagagcttcttcggctcggtgccgttcgacacgtatctgctcatgatcgtgttgaccgtcgccaacgtgaagattcccgattggatcgcctctataacccagccattgagcggcgccaacgcgctggtgtcgatgctgatggtgggcatgctcatggatttgccccaatccaagcatgacgtgaaggaagtcatggccgtcatcgcttggcgtataccgttcagcgtcgccttcgcgttgatcgcgtggctcctgctgccgttctcggcttcgattcgcgccgtgatggtgatctgcgcgttggctccgatcgccattttctccacgctgttcaccgacaaagtactcggcaacgccaaactggccggcttctcgctggcaatcaccgcgatgatttcactggtgatgatggcatttgctcacgcgctgatgggcgtgtgagcaaatgcgcaagtaggcacacgacgggcgcacggtcagacgagacgcagcccacataggttcgtcccccggccgccagctgctaccggcgcagcagcttgtgcgccagattgctcacgccgaagcggaacttgtccaccggcaacgtgaatttgcctaccatctgctcgacgtagccgttgaagccctgcttgaattccagcacgccgcggccctcgttgttcggatcgtcgaacacgccggaaatgccgtagaagttgtaacggctcacaccctgttccacacacaggtgcagcatcgcttcgtactgaatcagcgccgaggcgtagaacggcttgtactcctccaacgaaccggaatactgatagaccacctcattggggtgactgacgaacattgaagccgctgccggcagcacatcgcccttcttggcatatccctccacctcagccagacgcttgtcggcggccgcgagattgcgcgattcctcccccagctgacgttcgatgcgcgtggtcggacgttcatcgtatttcgtctgcagctgtgcgaccttggtctgcaaggcctcgcgcttggcggtcatatccgccacatattcggcgatgtggatttccgcgagcatgaaatgcgcatccgcgccatacgcctgcttgaactggcggaaatagtccgcgccgcgcgtcgcgaacccgcggcgttcaccggtccgccgttcgatatcggcgaacacgtcgaactcgtcggggccgatttcgcgaacgtgcacgcccatcgactgcgcccgcttgacgctccattgagcgcgtttgccgaatgatgccagcagttccttgccgttggtgatgccggtgagatccttgacgtacatccactggcagaccacgtcataaccggtatggaatccgccatgcgtccagccggcatcggtgaatccggtcagcagtgcatcgttcggctcgccgtcgggctgcccgtccgaggaatacagacggtaggcgacgttaggccagcatgccacggaaacagcatggtggcgacgggccgattcacgaatcgcctcggttatggcccgcagcagagccggatcatcgctaatgccgatggggccgaaatatacggagccatctgcaccgaaacgaccattgaggtacagaatcacgcagccggctaccagattgccggatgcgtcgcacacgccaacgcattcggcttcatgcccacgaatcttggcaagacggacctgcccggaccattgctgaaagctgccctggcttgtggcttcggaaagccggtcgaactcttcgggcgtaatcacgccaaacgtatacgtcgtatctgttcgattcgcagtcgcgctcatctcgtcgtcacctgtgccttatttctgtgtccgtgctcgccactgtttgtcagcgatgcagcagcttgtgcgcggcttcggatacaccgaagcgcagtccgtccaccggcagcgtgaacttgcccggaagctcttccacgaatccgccgaagcgagtcttgaactgccagacgccgtaggaaggatcgttggcgtcgaaaatgccggaaatgccgtagaagttgaagcgctccacgccacgggcgatgcagtcaagcatcgcctcgaagtggattagggaagacgggtagtaatccatgaaacgatcgtcctcgccgctggacaggcagacgacctcgttcggatgccagaagtagacaccggcttccaccggaatgaccgggccgtccgaggcgatgatgccattgacttcgccgatggtcttttccagcgccgcaatcttcttgtctgcggtggcgatgcgcttttccagcgttgccgggtcggaagcacccttcttggccgtgccttccggctgctgttgcgcgcgctggagcaggcgttcgaggttgcgcttgtctttggaggccgcattcagcttggattgcagggtgtccagatattcgtcgaaatgggtttcgaccaccttgaactcgatcaggtcgccgaaggtatcgaacagacgctcatagtaggccagatcgcggctcttgaagccttgacgtgcggcgctcatatcgcacagcttgacgaaagtgctcagttcgccgcgttccagtcggcgcacgcgcagaccggaatcctgggcgatgcggatgttcttacggcggtacttggagaacgaggccagcagttccttctcgttatgaatgcagtcaagccccttgacgaagttccagcggttcaccacggattcgtagcccacggtgaagccgccatgtttccaaccgaagcgggccatgttgtccatcatcgtggtgtccgggtcgctggtcggcttgccgtccagatcatgcagacggtagactgcggccggccagcaggatacgctgatggcgtgatgggccttggctgaacgacgcagggcttcggtcatcgcctcaaccacctgtggattgtcataatcgcacagcggtccgcaccagaccgagccttccaaaccgaaacgggaccgcgtgtacaccacgtagcaggcggcaatcagcttgtcaccgcgcttgacacccacatagtccaccggaccgttgaacgcacccatggcggccatctgcgaggtctgctggaaactaccttgcacttgagctgcggagaacgcatccagctcggcaggagtgatcttggtaggggtgagcgaggcgacgcctgcatcggattgcgtcataatcgaaccttcttacttgtcgttactctgatcgttactctgggctctggaatggcctgtgtgctgcgtccgtttaccgcgacagcagcttgtgcgcaaattgcttcatggcataggcgaccggtttgaccggcagcacgaactcgcccggaagttcctcgacatatccgttgaagccctgcttgaactccagtacaccacgcccctcgtcatcgggatcatcaaagacgccgtcgatgccgtagaagttgtagcgagacagcccgtgttccacgcagaaatgcagcatcgcgtcatgctgaatcagcgcggaggcgtagaagggcttgtactgctcgacgctaccggagaacaggtagatgacctcgcgcggatgctccacgaatagtgatgccgcagccggcagtacatccccgtctttggcgaactcggccgcctcgttcaggcgcttttcggctgccgccagattgcgggtctcctcccccagctgacgttcggttttggtggtggggtgttcggcgtttttggcggtcaatgccgccaccttggccgaaagcgcttcacgcttggacgtcatgtccgctacgtattcgtcgatgtggatctcggcaaccataaaatgcgctttgctgccgaacgcttccttgaaacggtggaaatatgcttcgccacggtattcgaagctacggcgttcagcggtttgctgctcgattcgtgcgaatacccccagctcgtcgtccgacagctcacgcacgtgcacacccatcgattgggcacgcttcacgctccactgggtgcgcttgtcataggacttcagcagacttttctcatcggtaatgccggtcagatccttgaggtagcgccaacgcggaaccgccgtgtagcccacggtgaaaccgccatgagtgaagccgatcgcctcgagctgttctatcagcttattgtcgggagcgccattctggtcatccggcaaagaagctccattggtgtcgcgaagccgatacgaggattcaggggtgatttccagctgtgaagcaccctttgccttggcatggcgtttcagcgcatccatgaagaaggtcaatgcttcggtgtcgtgatagtcgcacatcgggccatcatggatgaccgcaaatgtagagaatcgagagcggtgagtttcgaacagtgccgccgcgacgatcttctcgccctccttgagggccaaatattcgacgtcgatcccctgcgcggcgcgaaggcgtcccatcgccgaggtttgttggaaattgccttgtggatgcctggcggagaaatcatcgaactcctcgtctgtcaacttcaccagcacaaaatcacgcatgcttccctttgcctccgagtcaatcaggctcaccatgctagcatagcgcgcacacgacgaatggcggccgagcagatgaggtgtgcacatcgttcgcactattgccgccacgatgttccaaagaacaatggcccaaagatgatgaatgtccggcttgcagtgaatcaaacgcagtgctatattctctacttggctcttgaagccacgccaccttagctcagtggtagagcatccccctcgttcgtgggaaggtcggtagttcgattctatcgggtggctcttgttcatcaagaaggccgacgcactaagcgccggccttctttcgtatcgcccttgctaggtcataggcgcttgctagacactcgcccgattcgggggctgagtgctgagccgcgactcaactgtggcttagtcgcggctcagtgcagctagacagcctagacgacttagtgcagcagggcctcgatggcggggaccaaggctttcagcgccttgcctcggtgggaaatcgcattcttctcggccggagtcatctcggcgctggtcagcggctcgccttcatggtcaggctcagtgctgacgcgaccggcaggctgatcgtccgggacaaacagcggatcgtaaccgaaaccgtgtacgccacgagcctcgcggatgatgcgacccggcatgtcgccgagctccactgtctccgacttgatggcgtatcgagcatgcaccggggcagggctcccatcggcagccgtggtgtgaacggtgatgccgtcggcagccactccaccggtcacgtcggcaccggtctcggtgtccgggaccaccagcgcggcggcgcaacggaagcgcgcggtacgcttgtcatccggaatatcttcgatttgggcgagcagcagcgcattattggccttgtcgtggccgtgagcacccgcccagcgagcagacagaatgcccggagcgttacccatcacatcgacgatgagacctgaatcatccgcgacagcgggcagaccggtacggatggccacagcgcgggccttgagtagcgcgttctcctggaaggtgacgccggtttccaccggatccggcaggtgaaggctgccagcggacaccagttcgatgttttcggcatccgcgccaagatcctcttcgagaatgcggcggatttccacaagcttgccttcgttatgggttgcgacgacgatttgcatgaggttctcctttaagaaggctccccttgtcaggggagctggcttagtctagggacagagcggcacgctgggcggcttgcagttccttgttgcccttttcggccaagtcaagcagggtgccgagttcggcacggttgaacggacggtgttccgcggtgccctgaatctcgatgaaggtgccggaaccggtcatggccacgttcatgtcggtcatggcctgactgtcttcaatgtatggcaggtcaagcataggagtgccgttgatcacgcccacagacacggcggacacatagtccttaagcacgcggctggcggacttgatatggcggtgcttctccgcccaattaactgcgtcgaccaaagccacatacgcaccggttacggaagccgtgcgagtgccgccatcggcctgaagcacatcgcagtcaagctgaatctgattctcgccgagcgccttcatatcgatgacgccacgcaggcagcggccaatcagtcggctgatttcgtgggtacggccaccgattttgccacgtacggattcacggtcggtgcgttcggcggtggcacgcggcagcatcgagtattcggcggtgacccagccgaggccggagtccttgcgccaacgcggcacaccgggagtaaaagtggcggtgcacatcacgcgcgtgttaccgcattcgatgagcacggagccttcgggggcgtcggtgaagtggcgggtgatgcgcacagggcgcagttcgtcgaccttgcggccgtcggcacgaattatttggtgattgccaagcatgtctttgatttcaaccatgcgccccagcatacgccatccgctctatgcctggatagcaactcgtcaaccatcatcgaactacatcgcgccgctctgatacgtcatcgttgcccgccgcgttatcaccattgagagtttcactcatccagagggaagagtagccaatgtaaccagagggatgcggccagtgagatacggtcagaggactttggtctctgtggtcgaaccgttaagcggacagcccagtgggctgtccgtaggtaaggggagcagctatgctacgacggattcctatggagacgaaagttctcgtcagagaacctgagtctccgtaggaatcactggctcgcccttcatgaggctctgcgcggtgatgggcagttcggacaacgccttggcgtggtagtcgtgggcggccatgatggcgtcatggccctgccactgcgcatcgatatggccgtggtccacgaaatcgaccagcaggttcttccacgtcggttcgggcgtgaaaccggccagcttctcttccgagccggaaatcacgtgttcggcttcggctagcgcgtattcgtaggagcggaatgccaacttgcgaccgggcactgtggccttatccttggacttcttcatgaccggaaccatcgtgccgtcagcgccttcacgctcggtgagcttgtacaccatcgcacaagtgggagcgccggagccggtgaccagcatggtgcccacgccataggagtcgaccggcgcggtctgcaatgcggcgagcgcgtactcatccaaatcgttggtcacggtaatggtggtgttcgtggcacccagggcgtccagctggttgcgcacacgctgggccatggcggccaagtcgccggagtcgatgcgcacgccacccagttcgggaccggccacttcgacggcggttttcacggcttcctcgatgttgtaggtgtccaccagcagcgtggtgttcttgcccaatgcctcgatctgcgattcaaaggcgtcacgctcggaatcatgcaccaacgtgaagcaatgcgcggcggtgccaatggccttcagaccatacagctgggcggccagcagattggcggtacccttgaatccgcccactacggcagctcgagcggcggccacggcggcccactcgttagtgcggcgtccgcccatatccatgcaaggacgatccttggctgccgacgccatacgtgaggcggcggaggccactgcggaatcgtagttcagcacggatagaatcaacgtctccagtagcgtgcattcgccgaacgtgccttcgacctgcaaaatcggggagttcgggaagaacatctcaccttcgcggtaaccgcgaatcgtaccggaaaagtggaagttctccagccacttaatggtctcggggcttaccacgtgacggtcggccaggaacttcagatccgcttcatccaagtggaaatgttccagcgcatccagaatgcggccggtgccggccaccacgccatagcgacggccttcgggcaagtgacgcgtgaacacctcgaacacgcacttgcggtcggcggtaccgtctttcagagcggcgtcgagcatcgtgtattcatacatgtcggtcatcagagccggcgaataatcgaccattgcaaggcctttcctacataagtggtgaagttgcacctaagtgtagtccgggcaaagccgtgcgggaagggctcgtcttattctcgtatcgccagattcgatattgccgggttcagtatcgtcatattcatcggcactatggcggtcggtcacaccgaccataatcatcacgaccagccaatacgccagccgcaccatacggcccactggcgaagcggtagactcgatgcatgagattcatcgtggcgttgtggcgctttgcgatcgccggtttctgcttcgtgggcacatatgaggcatggtccaaaccgcagttctgggtgtatttcacgttccagaccggtttcgtgctgggcatcgtgatgctgtggtccggcgcggccacactgctcaaaggtattcagccgcctgcatggcttaaggggtgcctgactgtgtacgccatagtcaccgcactggtggcgttcttcctgatgcctccggacgacccggcatacgtgccacaggttattggcatcatgaccaatacgatgctgcacaaaatcgccccgattatggcggttatcgatttcgtgctattcgacccgcaccggcgtttccgctggcattacatgttctcgtggctggcgtacttccctgcatacttggtcttcgtgctggcccgtgcggcgatttggccggggtccggaccggcggccggcggcagtccgtatccgtacgacttcatcaacctcgacgcactcggctggcaagggttcggcattagctgcggcaagctggccatagcgttcttcgtgatatcgctcgttgtctggctgctcgaccgcgcactgccgagcaaggccttactcggatagacgcgcccacgatcgacgcgcatcggtcttagtgcccagccggcatccagctcagcactcgatggtttcagcattcgatggtttcagcattcaatggaataggcgcggtttttgtactcgcgccaatccggccagtcttcaccggcgtcgatggcacgcttgatgtcgccatagtaatggagcttgcgctgcacgtgcatggccgcctcgttgagggctcggcgctgctcgtccaaggattcgcggcgagattccagcagatcaaggatttcatcgatatgctcgggctcattggactcatacacgaagaactttttaagatcgtcaatggtcatgccggcgttcttgaagcagcaaatcgcgcgcagacggtcgatatggcagtcttcgtatatgcgctggccggtttcggtgcgctccacgttggtcagcaatccctgatcctcgtaatagcgcagcgtagagggctgcatatggaactgcgtggccacctgacgaatggtgtaggacatcatgactccttactgcggcaacacgccgaagcatcgcagccgtttgcattcaagttcacttgaactggaaccatagtatccaagaacacttacgaataccgctcaatcggcgtcggtctgcccatcgcaggtaagcattcgtaagaacaagaatgacattgtaaggagactcaatgttcgagccaaccgccatctatgcccccaacccgcaccgttacgacacgatgacctacaaccgtgccggcacctccggcctcaagttgccggccgtctcacttggcttctggcacaacttcggcgacatcacgccattcgaccagatgaagtccctggtcttcaccgccttcgacaacggcatcacccacttcgacctagccaacaactacggccccgagcccggccaggcagagaagaactgcggactgctgctcgccaagtacttcaagcatcaccgcgacgaactcgtcatctccaccaaggccggctacgaaatgtggacaggcccctatggcgacctcggcagccgcaagtacctgctcgccagcctcgaccagtcgctggaacgcttgggcttggattatgtggacatcttctaccaccaccacccggatccggaaaccccgcttgaggagacgatgggcgcgctggctcaggccgtgaactccggcaaggccctgtacgtgggtctgtccaactacgatggtccgacgatggaaaaggccgccgcaattctggcagaactgcacgtgccgttcatcatcaaccagaacaagtacaacatcctcgaccgcaccgttgaaaagaacggcctgaaagagaccgccttcaagctgggcaaaggccttatcaccttctgcccgctggctcagggcctgctgaccaaccgctatctcaacggcattccggccgacagccgcatggctcacgatccgcgattcctcaacgattccgctctgaccgagaaactgcacaagcaggtcatggatctgaacaatctggccgccgaacgcggccagacgctggccgagatgagcctggcatggctgctgcacgacggcaaggtgacctccgtgctgaccggagcctccaagccgcagcagattctcgacaacatcggcgcgctgaagaacacccacttcagcgacgaggagctcaagctgatcgacgagatttccgctcggtgaccattttggctcccctcgctgaggggagccaagtaccacctttagcgcgtcatttcctcgtaaatccgcttgcagtcggggcaaaccgggtacttggacggatcgtgcttgggcacccaaaccttaccgcacagggccaccaccgggcggccggtcgcacgcgattcagcgatacggtccttggatacgtagtgcgcaaaacgatcggcgtcgccaccatcgtcacgaaccggcgactccttggtctccggacgctccagcaccgacgtgccggcaccttggtccgggttgcgcagcggttcggcatcatcaacgaacatctcggcaaaagtcatggtgcacttctttcctcgtattcaacgattcgactgcactccatcatagattcccgtcgttacccgcgaaacccattggcgcgtaatccgcacacctccacacacccatgtcgcgcatcacgccaccccgccacatacaatgccacatacaatgccgcacacgacgccacaccgacgccacatacggcaccgcacgcactgcctcatacgccgacgcgacaacaatgcacgctcggcagcacgaagcacaccactagcggtaggctataaagcatgactatcgcagtatgccccggctcgtatgaccccgttaccgccggacacttggatgtaatcgagcgctcggcgcggtttttcgacgaggtgcatgtggtggtggccgtcaacgccgcgaaaacaccgatgttttccgaagccaccagagtcgacgtgatccgccgcgcccttgacaaagccggttgcaagaacgtcaccgtttcttccaccgacggcctgatcaccgactactgcaagaaggtcggcgccaccgttatcatcaagggtctgcgccagaacggcgactatgaagccgagctcggcatggcgctggtcaatcgcaagctcgctggcatcgaaaccctgtttttgccggccgatccgattcttgaacacatctccagttccatcgtcaaggacgtggcccgccatggaggcgacgtgaccggcatggtgcccgattgcgtcgtgccgatgctggccgatgccctggccgaggaacgtcagcggaaggactgatgcactaatgactatgagcgatgaccaccctactggatacgtcgatctgaccaaaccgaatgcggacgccgcatcgtccactccggagccgtccgccccggaaccgcccgcgtctacgcaagccgcgccggcacccaccgaagaggccgatgttctcgccggatcgccgcccgccgcgcctacccctactccggcacaaatgcaggccaaagcgcaggcccaagcagctcagcagacccgggcacaggctcagaccgctcaggccgccggcattcgcccctcgttcatgaacgaaatgcccgacctgcgagaaaccacggacgacgacccggccacggtcaagagccacgaggaattcaccacggtgtatgacatcatcgaccagctcgaggcggcactgggcgaagcgaagtccagcatattcgcccccggcatggtgaaggttgaccgcgacgaattcaccgaccagctttccgagttgaagaaaatgctgccggtgcagttggagcgcgcctccgccctcatgcgcgaggccgagcgccgtctggaatcggcacagacccagtccaacgccatcgtcgcctccgcacaaagccgcgcagccaacatgatcagggacgccaacgaacaggcacagttcctggccggccaagagaacgtcaccgagcttgcacggcagaaagcgcgcgcgattcttgaccaggcacagaccaaagccgaccatctgacccaaggcgcggaccagtactgcactacggtgatggaagggctgtcccagcagctcggcaaactcagtcaggatgtgcaggccggtcttaacgtgctggaagagcgccagcgcgcggcccgcgaacagatgccgcacctgacgctgaacgactatcccgaagcccagtaacgccagcaacgccggcaacatcagtaacgcgaataacgccagtaacgaataactccagccaacatacgaaaggcaccaagaacataccatggcacgagttgaagattccccgtgggccattccggtagcgcagattgcttcgcgcgccggtcaatccaagccgattgacgccgatttcccggcaccttccggcattggcgacagcattgtcggcatcaaggaaggtgagcccgtacacgtgagcgggcagttcgattcgattgtggacggcctgatcttcaccggccgcctggtcgcgccattcgtcagcgagtgcacgcgctgcctgaagccgattgacgaggactggccggttgatgtgacggtgttcttcccgtacgagtcgggtcaggacaaggccaacggcaagggcggcaagagcaagaaggacgacgaaatcgacatcatcgccggcgaggacgagtcggaagacacgtatccgctgctggagaacggcgcattcgcggacatcgaggcgatgatccgcgacacgctggtcgaatcgctgccgttgcaaccactgtgccgaccggattgcaggggtctgtgctcgcagtgcggtgccgatctgaacgaggatcccgaccatcatcacgatgtgacggatatccgttttgccggattggcggggctcaaagcccagctcgaggccgagcagaacggcgagcaggccaagtgacgcgcgcctgaacgaagtttgtacgagccgtgcgttaagataacggacgcttaagctcaattgttcgaacgaaatagaggatactcaaatggcactgcctaagtacaagacctcgcgcgccaacacgcattcgcgtcgcgcgaactggaaggccaccgctgctgcgaccgtgaactgcccgaactgtggcgctccggccctgccgcacatggcttgcccgagctgcggtaactaccgcggccgcacctaccgctccgccatccagccggctcacaccaagtgagtcctgcgataacggcttgaatgaaggccctgccatcgacgggtggcggggtcttcgcataagtgcaccattgcgtacaccatcgcatcgcaaacaacacaacacaacacaacacatcaccatcgcgtgaaggaccatacaacaatcatgagtaatgaaaccccacagcagccgacgccggccaacgagcttcttgaagcgttgggcaccactctcagcccggatctgctcgtgcaggcactcacccaccgttccttctcgcatgagcaccccggcgtggccaattacgaacgcctcgaattcctgggagacgcggtgctcgaactggtctccactgaaacgctgttcaccattcacccggatatgaccgaggggcaactggccaagatgcgcgccaaggccgtctccgaagacgcgctgagcgccatcgccaaaaccaagctcaaggtgggcccctacattctgctgggtcacggagaagccgagcagggcggcgcggagaagaactccatcctatgcgacatcgtggaatcgctcatcggcgcgaccttcctggaacacggcatcgacgaggcacgcaaggtgattcaccggcttattgacgacacgctcgccgaagtggccaccgagggcccggcacttgactggaagacctcgctgaccgtcaaggcgcacggcctcggcaaggaggagcctgtctaccatatggaggtctccggcccggaatacgcgcagatcttcaccgcgcgcgtctcattgggcgagaacggcgacatcatcggcatcggtaagggctccagcaagcgtaaggcgcagctggcggccgccgaagcgggctggaagtcactggactcgttcaagacgcggactaagtaagcccgctgtcggatttgcgaatagactaataccaacatgagcgacgagtcgcgccggggccacaagtctcggggaagcgactggaatcagacacgcgggcacccggccccatcccaaggtcgggcaggttcgcgacaaaacctatgaggtgagaggaatcatggctttacccacgcctttgcaggcattcagcggtgtaccgaaaatcaacacggcccccgataagcagaccatcgtcgatggcgagaagatgactggcgcccaggcgctgattcgttcgctggaggacctcggcgtcgaggacgtcttcggcattcctggcggcgcgattctgcccgtctaccacgagatcaaagacaacacgaagttccgcttcgtgcttatgcgccacgagcaggccgccggccacgccgccgaaggctacgcactggccactggcaaggtgggcgtgtgcatcgtgacttccggcccgggtgccacaaacgtggtcacggccattgcggacgcgaacatggactccgtgcccatggtcgtgattaccggtcaggtgggcgtgcaagccatcggcactgatgccttccaggaggcggatatcgtgggcatcacctacccggtgtccaagcactccttcctcgtgacccgcgcgcaggacattcctcgcgtgctttccgaggcgtactacatcgccaacaccggccgccccggcccggtggtcgtggatctgaccaagaccgcacagaccggcgacatgtactactcatggccgcagcgcatgattctgcccggctacaaccccaccaccaaggcgcacggccgtgtgctgtccgacgcggcgaagctgttctctcagtcgtaccgcccggtgctgtatgtgggtggcggcgccgcccgctccaacgccggcgcacaggtcaaggctctggccgacctgaccggcgctcccgtggtcacgaccctgcccgcacgcggcatcattcccgactccgacccgaagaacctcggcatgctaggcatgcacggtacgattgccgcaaccggcgccgtgcagcgcgctgacctgcttgtggccatcggtgcacgtttcgacgaccgcgtgaccggcaagctcgacgccttcgcaccgaccgcccgcgtgattcacattgacatcgacccggctgaaatcggcaagaaccgtcagcccgacgtgccgatcgtgggcgatgtggctaccgtgctcgacgacttgattcccgagattcagcgtacgcaggccattcagggcaagccgaatctggccccctggtggaaggcgatcgacggctggcgcgaggaatacccgatgacgtgggatgagccgaccgacggatcgctggccccgcagtgggtcatcaagaagctctctgagatggccgatccgtccaccatctgggtgaccggtgtgggccagcaccagatgtgggcttcgcagttcatcgattttgagaaccagcacgcttggatctcctccggaggcctcggcacgatgggctacggtctgccggctgccatcggcgcatccgtgggctcggcccgtgaattcgagggcaagaagccggtgtggctgatcgatggtgacggttccttccagatgacctctgaggagctggccgccgcgttcctggaccacgctccggtgaagatcgcgattctgaacaactccgtatacggcatggtccgtcagtggcagacgctgttctacgagcaccactactcgcagaccaacctgctcgatggtgaagcgcacggtgccgatggtgcggcggcactggccgacggcgatgcgccgctcgaagtgcctgatttcatcaagttggccgaggcatacggctgcgtgggtatccgcgcgttcaccgaggaagaggcgattgccgccatcgaaaaggcgaaccagatcaacgaccgcccggtgctgatcgacttccgcgtgtggaaggatgcgatggtgtggccgatggtagccgccggcgcccccaacgacgaggtgacgtacaagcccggcatcaagccgctggctggcggcaccccggctccgggaaccggtccggacgagcatgcgaccggcgtgttcgagcacgagaccgccgctgccactgcgagcgagcactgaggagaggagaacactcatggctaactatcctgcatcccagcctggttcccagcgtcatacgctgtccgtgctggtggagaaccgcccaggcgtgctggcgcgtatcgccggcctgttcgcccgccgtgcgttcaacatcaactcgctgtccgtctcccccaccgagcgtccggacatctctcgcgtcacggtgaccgccgacgtggaggccgtgccgctggagcagatcatcaagcagctcaacaagctgctgcatgtgctcaaaatcgtggaactcgacccgaactccaccgtggaacgcgaactggtgctcatcaaggtggccgccaacgaatccaaccgttccgacgtgctggagatcgtgcgtctgttccgcgtgcgcgtggtggacgtgaatccggaatcgctgaccattgaggccaccggtgccgaaggcaagatcgacgccctgctggggcttttggagcattacggtgtgattgagctggtgcgctccggtgccgtagccgtgacccgcggcccgcgcgccctgagcgaaaaggtcgtcggttccgaggttaccgggcgctgattcggcgactgcgggaagacccagtccaagctcaaaaggcggatgcgcatgatgcatatccgccttttttcatgcgtgcatacctcatcacccgtactgcaagcaaaacgacagcacctcatgctagcattatgacagcaacaaggaggtgcatcatggcaacattgaccatccgaaaaatacccgatgagcagattcagcagctcaaagaagtggctgagaaaaacaaccgctccatggaatctcaggtgcgatccattcttgaagaatggctggctggcacggtggcgcatgaaatcacgcgaaagaccaatttctatgacgagatccgcgaattcatgaagaacatggattttgagggactcgacaagggggaactcccactatccgagcgaaattccgccgattcccgaccgccagtatcttttgaataggaatcggccatgattattctggacaccaacgtcatcagcgaaatcatcaagaaacagccagacgaacacgttgccaattggctgaggaaccaagatacaagcaatttggcaaccaccgccatcaccgtcgccgagttgttggccggaatatgtcgcatgcctgaaggcaaacgacgaaagtacacagatacgaccgtcaagctggcgcttatgacattagaggacagaacgttcgcatttgacactcaggcagctgcggattatgcccatatccttgtcgaacgcgaacacaggggcacacctaccagtattcaagacgccatgattgcggcaattgcctgttcctgggatgcggccatagccacgcgcaatatcaaggacttcgaaggtaccgacgtggaattgattaatccgtgggagtttgcatagcgggaggccccggcaaactgccgaggccttgtgaacgttacggtttctcccgctactccaattgttcggagagttcgagccattcggcttcgagatcatcgctttcagtattgacggcggtgagttgttcattgagcttgttgagaccctcgtagtcgctcgggtcatgggcggccatctgcgcctcgagatcggccttctgctcttcaagcttagcgagcttacgttcgatggcattcacgcgcttggatgcctcgtggaaggccttgccggtgagcttcgaggtggagtcctcaccgttattggctccctctgacgagggagccatccgcgaagcggactgagggagagatgcggcagcgttgacggcggccgccttacccttaccagacttcgccgagctgctaccggtgcccgcgaagccaggcgtgtcagccggcaatcccttgccgttcttaatagcctcaaccatatcgaggtagtcctgcacgccgccgggcaagtgacgtactttgccgccaatcagcgcgaactgctgatcggtgacgcgctccagcaggtaccggtcgtgggagaccacaatcaacgtgcccggccaagtatcgagcaggtcttccatcacggcgagcatatcggtgtccagatcgttgccgggctcgtccatgatgagcacgttcggctcgtcaagcagaatcagcagcagttgcatgcggcgcttctgaccaccggagagatcgcggatcggcgtcatcagctgggcggattcgaagccgagacgctccatcaactgtcccggcgtcacttccttgccatccacaatgtagctcggcttatagcgggaaagcacttccttgatcttgtacttgccgagcttctccagctcatcgaggcgctgcgagagcaccgcgaacttcaccgtcttgccaatgttcacatggcctgcggtcggggtgagtgtgccatcaatcaacttaagcagcgtggacttgccggcaccattcgcaccgacgatgccgaagcggtcgcccgggccaatcagccaagtcacatcgtcaagaatctcgcggccggaaaccgtcaccttgcgtgcagccgaggtgacaccggctgcagcagtgtcatcatccgaatccgttgcagcagtgccaccgccgatggtttcaccacccgtgttcatgcgacgaacctcgcgatcgtcagcaagctgcggattgccgctctcagcctcggccttcttacgcgcttcctcagcggactcgacggcttccggcacgccggcgtccaccaggcgcgggtcagtcatgtcggtgaccgccacctcaacggaaccatgcagctgcggctcggcgtacatggcgttgaccacatccacgcgggaagcggacgcggagagcgccgccacatccgggtcgatatcggccatgccctgcggtttttcgaaaatctgcgtcacgtcgaccaaatcgaccacctgtttgccgagacgggaggtggccatttgcttcagttcaagtgtgttacgcatcggcggcacatcggcaatcaattcgcgtgcggccttgacgtggaacttctgcttggtggaacgggcacgggcaccgcgcgaaagccatgcgagctccttgcgggccagattgcggcgcttggtttcgcgcacatcggcttggcgatcgcgttccacgcgctgcagcatatatgcggaatagccgccctcgaacggctcgatcacgccatcgtggacttcccacatcgattcgcagacctcgtccaagaaccagcgatcgtgggtcacgagcaacagagcgccctggcctttggaccagcggttcttcaaatgttcggcaagccagtggatagtgaccacgtcgagatggttggtgggctcgtcaagtgcaagaatatcccaatccttgagcagcagtcgggccaaatcggcgcggcgacgctggccgccggacaaggagccgaccttggcatccaggctcatgccgccgagcaatgcctcgacgatttcacgggaagtgttatcggacgcccattcgtagtcggcgcgcccctcaagtgcggcttcgcgaatggtggcgttgtcatcaaggggatcacgctggtcaagcatgccgaacgtgagtccgccacgctttgtcacgcggccggaatccggctcctgagcaccgcggaacaggtgcagcaacgtggatttgccgtcgccgttcttgccgacgatgccgatgcggtcgccttcaaaaacaccctgcgttacatcagtgaagatggttttggtagcgaaagcgagcgaaacgtgttccagtccaatgtcataagtcggcatgactcaccaatgtagcgccacgcttgcccagcggcggcccgcaaacgttatttgttcagcgtctgagcgtaggagttgcagcgggccgcaaaaccggagaacacttgctcggcgagcggttgcagtagctggtcgtattgggcgaactgctcgcgcaatcgggacttggacccacccgcggccttgagatccttgaccatgctcggctcatccagccattcgtccagcagcgagccgcacacctcaagatggaactgcatgcccagcgcggatcccagtcggaacgcctgcaccttggtggaagacgaacgcgccagcagctggcctccctcgggcaagcccaccacgtcgttatgccagtgcagcaccgtcagctgcttatcccacatggagaagaagtcatgcttgtccacacgcttgatcggcgcgaacccaatctccggcgcatcgcccttgcgcagctgcgcaccaagcgcagtggcgataatctgatgccccaggcatacaccgagaatcggcttgcctgaagccacggcggcacgcgccaacttggcttccgccttcagccccggatacttgtcgtaatcaagcgcgcccataggcccacccatgattaccacgccagccagttcgccgaaatcaggcaagtccggtttctttttgtcgacgatattcatcgtcaccgtctcaagaccgatgtcttcgaggttcgacaatatgcgtcccggacgttcccatgggacatgttgcaaaatgagcacttgtggtgtggccatgacttctattgtggcacgagcgttccccgtttgcgtaacgagcagggcaaatccatgaatctcgcagtttccgcagcggtcaaaggcgtgttctcgcgagactgttgtcccgcttctcatccgtctgtcacctcgttcgggccccacctgtgaagcgttcatcaagctcttcgagtaacgattcagcatgtctggttcggaccctacgcttgagcgttatgggaaacagccaagaaccgcaggatttcaacatttccgtcatgccttcaagcctgacgccggtgcatgtcgccaaggccgcagaaggcctgaatctgtatgacaccgcctcgcaccaggtcagccatttcgtgccgctcaagccgggcgaagtcggcatttatgtgtgtggcgccaccgtgcagtcgtcaccgcatatcggccatatccgtgccgccgtggcgttcgacatcgtgcgccgctggtttttgaagctcggctacaaagtcacttttgtgcgtaatgtgaccgatatcgacgataagattctcgttaaggccgcggccgccggccagcgttggtgggcccgcgcctattactacgagcgcgaattcaccgaggcgtacaacacgctcggcgtgctgccgcccaccgtggaacctcgcgccaccggccacatgtcggacatgatcgacctgattcagcgcattctcgacaacggccacggctatgtggtcacggatgcggacggcaagcccaccggcaacgtgtacttcgatgtggcatcctggccgcattacggcgaactcacccaccagaagcagacctccgaagtcgatgaggccgccgccgtggccgaccgcatgggcccgtccgtggacgccaccggtgccgacaagtacaatccggtcgacccggccgacgcctcccccgacaagcacgacccgcgtgatttcgccctgtggaaggcccccaaggacaccgatcccgaggacgcccgttggtcgacgccgttcggcgtgggtcgccctggctggcacatcgaatgctccgccatgtcccaccgttacctgggcgatggcttcgacattcacggcggcggtttggatctgcgcttcccccaccacgaaaacgagatggcgcagacctgcgcggccggctacccctctgctgcgcgctggatgcattcggcatgggtgaccgccaagggcgagaagatgtcgaagtcactgggcaccggcctgtccgtgccgagcgtgctggccgagcattccgcttgggtggtgcgttacgctttgggctccgtgcagtaccggtcgatgctcgaatggtccgatcaggcgttggtcgaggcgcaggctgcatacgaccgtgtctcgaacttcatcgagcgcgccggtgtggcactgggcggtcagccttctcgcgaggaggttgctgccgtctccgccgacgatttgcccgccgatttcgtggccgccatgaatgacgacgtcaatgtgtctggtgcaaccgccgcgatcttcaccgccatccgttccggcaatacgttgctttcacagctggctgaccgcgccgattccgaaaccgccaaggccgaggtgcgtgaggcgctgctcgccgtgcgtgccatgctcgacaccttgggtctcgacccgctggccgaaccgtgggtgtctgctggcggtgccgctgatggcacggccgagtcgcccgagcatgcagcgctggaggcactgatcgccgaacagctcaacgcccgtgccgaagctcgcaaggccaaggatttcgccaaggccgatcagattcgcgacgctctgaccgaggccggcatcgccatcgaagacggcccgcagggttccacttggagtctgaagtagtcgcttcaaacccatcaatcagtcaaacacgaagtccacgtccacgatgtgcaggcgcttgctgagctccttttccagcgagcgcttgcattcgatgaggtcagctacatcaatggtttcgccgatgccgctcagatacacgtcaacggtgtagttcataccggtcttgaagatcagcgtctgctcgtagtcggtgttggcaggcagatggcgctgtgcctcggcctccacgtaggcgttggtttcatcgtcgtcatgcacgccgccgaccaattccacgaacgcctctttgagcacgctgaacggctccttgatggtcaatgccaccaaagccacggtgatgaagaaatcgccggtgtagtgcaggaagtcaagcggaccgccggccggtagcagcatcaggaagatggcaactacgccgatgccgaacgacatcgatccgtcgaccaacgtgctcttgcactcggcggtgagcatggtgctggaatcgccgatggatcggttggagcgccggtaatacgtgtataggctgaagcacacgattacggtcaggatctcgtagatgaccaccgggccggtttcaatgcgttcgccggacccgaacacgaagtagtcgtacgctactcggcacacgtcaatcagcgaatacaccaacaacgacatggtgaaaatggccttgcagatcgcgtagataggttccagtgcgaacatgccattggggaagcgctcggtggttcgcaccgtgcgcgacgagaggtacaccgccaccattccggacaggacggaaatcgcggtgaaggagaagtcgaggaacatggccttgagaccggtcatgaagaacacggccatgccggctaagacctgcagcacgttgatgacgataccaacgatcagggctttgcgttcgagtagtttttgggtgggcatcagtgggccttccttattgcacggcatgtctgcgttggcccgaacgtcatggttcggagcgcacggcagtctgcgtataagcggtgtccagcgattttcaaaacagcgtaagtattccaaaaaacacaggattctttacggtttccatggtatcggaagcactcgattggcttcgccacgagcggacggcacggcatttgccgtctgaatgcccaacatccctgactactacgcggcacattccccgaaaagcgtcgtccccaacaccgcaatttcccgcgtggcggctagactgttgcccattatggcagctttttcatctttgacagacagactctcgaatgcgttcaagcatctgaagagcaagggcaagctttccgaggcggatatcgacggcacgatccgtgaaatccgccgcgcgctgctcgacgccgacgtggcgctcgacgtggtgcgttccttcaccggcaaggtgcgtgagcgtgcactgggcaccgaggtgtccgacgcactcaaccccgcccagcaggtggtgaaaatcgtcaacgaggagctcaccgacgtgctcggccaaggcgtcgatcgtccgctgaacttcgcgaagaacccgccgacgatcatcatgctcgccggccttcagggtgccggtaaaaccacgctggccggcaagctcggctactggctcaaggattccggccacacgccgctgctggtggcggccgatttgcagcgtccgaacgcggtgacgcagctgcaggtggtcggcgaacgcgccggtgtgcccgtctatgctcccgaaaagggcgtccaatccgatggcggcgaggccgtcgcagctccgggccagacctccggcgacccggtgaaggtggcccgcgattccatcgaactcgccaagcagaagctctacgacacggtgatcatcgataccgccggtcgtctgggcgtggacgaggagctgatgaagcaggctcgcgacattcgcgatgccgtgcgtcccaacgaaatcctgttcgtcatcgacgcgatgatcggccaggacgccgtcaagaccgccaaggcctttgacgaaggcgtggacttcaccggcgtggtgctctccaagctcgatggcgacgcccgcggtggtgccgcgctgtccgtggcgtccgtgaccggcaagccgatcctgttcgcctccaacggtgagggcctgaaggacttcgaggtcttccacccggaccgcatggcctcgcgtatcctcgacatgggcgacatcatgacgctcatcgagcaggcgcagaagcagttcgatgaggaagaggcccgcaaggccgccgagaaaatctccgaaggttccttcggcctggacgacttcctcgatcagctgcagcaggtgcgcaagctgggctcaatgaagtcgctgctcggcatgattccgggcatggcccagcaccgcaaggaactcgagcagttcgatgagagggaaatcgaccgcaccgaggcgattattcgctcgatgaccccggccgagcgccgcgatccgtcgattatcaatggttcccgccgcgcccgtatcgcctatggttccggcgtgacggtttctcaggtgaacgctttgctgcagcgtttcgagcaggccgcaaagatgatgaagcgcatgtccaatcgtggcggcatgggcggcggcatccccggcttcggcggcccggctatgggcggcggcaagaagaagggcaagaacaagaagaagggcggcaagtccggcaatccgatgaagcgcgaggccgaggagaaggcattgcgcgataagctggccggcaagtcctccggttcgaccggcggttccgccttcgccaagaagccacagaacccggccctgcccgctggccttgagcagatgatgggcaacgtcgacggtggcactgaactgccgccgaacctcggcggaggccttggcggactgttcggtcgctgatctcacaacttggctcccctcgcagaggggagccaaattatatctcggttcaatttatatttcgaaaggaacttccatgacgacaatcctcagcgcggtggcaatcatcgcactgttatggacgaccttaagcgcgctgcccgccggtctcgaggcccgtatgccgcttccgtacatgattgccctgacgccgctgttgtgtgttcctttgatgattctggccgcggtcgccgcatggcaacatgaatggactgcgatgtcgttgcttattgtggtcgcgctgattgccagctcacagcgcatcaactactggggtacgtcaatcgacccggccgggaaacgcaaagaatcccaccgtgaaacagcccgtgaaacaacttcgccgacgctgtcaaaaagccataacagcaatacatcgggtacctcaaacacttcgaaggaggggcccgaaaccatctccgatggacaccgtgaaacaacgcgtgaaacactctcgccccagttctcggttatgacgatgaattgtcgatacggacgcgccgacgccgctgaaatcattcgcaatattcgcgaacgcaatatcagcgtattggccttgcaggaagtcaccgacgacctcatcacacgtcttaccgaagccgacatcaacgaacttctcccctaccatcagttcggagacgccaaagagaccgataatggcggattcaacgtgatctattcccgctacgagccgagcgcagcggtgcccaacgtggtctccatccccgccgccgacgttcccgccatcaccctcaaaacctccggtaatcgcacggtgacgctttgttcggctcacccgaaatcgccgatgcgcggctgcgcggattggtcggccggcattctgggtctgcgagaactcgcccgtgcaaaatccgtcagcaatcgcaatatcgtcgtcgttatgggcgatctcaactcgagcaccgaccatccgagcttccgcgcgttgctcaagtccggattcaaggacgcaagtctgattcaagccgccggcccgaatctcaccttcccgagctggctcaagtggccgcgcatcgagctggatcacgtgctgttcactcccgggctcaaaccgtccggcgtgaagtcgtttgaggtcgagggcactgatcatctggccctgaccgcaacgcttgcactgcgatagccggcattttcgcgatacattccccggaatgttgcgcaacggggaacgcgcaccacaccgcaaccacagtgcgccacgcccagtccggccctgtgcgctataataggccagttattcgcgcgcgcgtggcgccctctacaccccgagccgcgaggacacgtggattccggacggccatgccccacatggcaaaccgagaacccgcacacctagcattacaaggagagccattttggcaaccaagattcgtctgaagcgacagggcaagaagttctacgccttctaccgtgtggtggtcgtcgattcccgcaagaagcgtgacggcaaggtcatcgaggagatcggtacctacaaccccaacacccagccctcgaccatccagatcaagtctgatcgcgctcagtactggctcggcgtcggcgctcagccgtccgagcccgtcttcaagctgctgaacatcaccggcgactggcagaagtacaagggccttgaaggtgccgaaggcaccctgaagaccgttgaggctggcccggacgccgaggcccgcatcgcggccgttgaggaccaggctcagaagctgaaggccgccaagtccgaagctgctgccaaggccaaggctgaagccgaagccgctgccgccgctgaggaagccccggctgaagaggccgccgaagaagctccggctgaggcctgagcggaaacgaaaggctagctatgcttgcacaagctgtggaacacctcatcaagaacatcgttgattttcccgacgatgtttccgtcaagtctcatgagaacgcgcgcggcgaactgcttcgcgtacgcgtgaacccggaagacatcggccgtgtgatcggccgtggcggccgcaccgccaacgcgattcgcaccgtgattcaggcactgtctgaccacaaggtccgcgttgacatcatggacgtccgtcgataaccgataaggaacgattcacagcatggcacagcaagacatgcacgacgaccctcagcagctcgagttgctgagggtcgctcgtattggccgcgcacagggcctgaagggcgaagtcaccgtgcgcctgtacaccgatgatcccgagtggcgcttcgagccggactccgtgctctacagccaggatggcgagaccgagtacatcgtcgagggctcgcgcacgttcaaggatcgttggattctcaagcttgagggcgtcgacgaccgcaatgccgccgaggccctaaacggtgtcgaactctacggcgaggtcgacgatgcggaggacatgctcgaggccgacgaatggtatcccaaggatcttattggccttgaggcccgtctagtcgagggcaacggtctgggactgcccgccggccaagtggtcggcaaagtggtggatgtggtcgactcccccgcccaatccctgctcaagattcgtttgaccgagccggtggtaaccggccagaattccaagggcgaggatgtggtcgaaaagaccgcgttggtcccgttcgtggaggccttggtccccgacatcgatctggaggagcaatatctcacgctcgatccgcccggcggcctgattccgggctgcggcatgatctgacacataggggggcgctgcgcatgcagcgcccccctatgttctgtcggttcccaaaagggcgctccacgccgtgggtcatatccatccacggcgtggagcggaccggacggccgccgtccgcgtcaccgggccgccgcggtgacgcgggtcatgaaacggccgaggaattccggcacatcgacgcccaaggcgacctgcgtgtgtttgtcggggtcctgaagccgtgaacgatcgccgatggtacggcctcggaacgggccctcgagatcgacttgcaagttgaacccgaaggtcgtgaccagcgatgggtcgagcgcggcggccacggccagcgggtcgtgcagtccacatccgcgaatctccggctggttcttcaggtagaagtcgatgtagtagtcggtcatggtgacgaggaagtcgccggcctgcgtccccaaagacgcccattcatgggctttctcacgagtgagcgcggtctggtgggtcacgtcgaggccgatcatggtggtgcgtgcgccacacttgaacagatagtctgctgcctctgggtcttgggagatgttcgcttcggcggccgggctcacattgccgggcaatgtgagggcgccgcccatcaacgtcacgttcacaccggaatccttcaggtccggagcgttgcggaatacggtggccatggtggtcatcgcgcccgtaggtacgatggtcaggtccgggccgtattcgcgcgcggcggtgatgatgaaatcgaccgccgagcctggtgcttccggagcgcgcggggagtcggggatgattgcgccgccgatgccgttggaatggtggaccgccaccgagccgggagttggtgaccacgaagcgtccgtttgccagccgtccgcgccgccgttctgccagcgcgcgtaggcctgggcccgctcgtctggtgtggtgccacgcattttcggcaatgttgccggggcgatgggatggtcgactccgggatagaccggaacgtcgtcacggccgaacaagtgcagtaccgccagcgcgttacgcgcggccagcggcaccgcgacattgccgtaggtggccgtgataccgatcaaatcgatctcgtcggcactgcctagggcatatgcgatggcgagcgcgtcatcgatgccggtatcgaggtcgaggatgagttttttgcgcacaattatctccttgtggaactacccgggactactccggcgactacccctcagtctcgctacgcgagacagctcccctgacaaggggagctgagaaagttcagccgagcttggcgagttcttcgggggtgagttcgagctggtcggccttcagggagtcgaggatggtttcgggacggtgcgcgccgggaatcacgaacatgtggtcgcccttggcgagctcccatgccagcacgacctgctggtagctcacgccgtgggccgccgcgacctcgcggaacgggtcgaacttggtctcatcataggggtgacggtagccgccgagcggactccagcacacgaaggccaagccaaccttggcgcagtagtcgagcgtgtcctgggtctccaggtgaatcggcgagtactggttttgcacggccacgagcttgtcgcccagaataccgcgcgcaatgtcgatttgctcgatggaggcgttggagataccggcctcctgcgccacgccctcgtccaccagctgcttgatggcttcgacggactcgttgtacggcaccttcggatcagggcggtggaagtacagcaggtcaatggtgtccacgccgagcgccagtgcgctctccttgccgcgacgaatcaggttctccgggcgaccgtccacatcccacgtggggcggccgtcggtgaagttgcggaagtggcccaccttggtggccaccagcacctcgtccttcggccccttccaggtctcaagggcctcgcgcaccagcttttcaccggtctgttcttcgccgccggagcagtagtaggcccaagcggtgtcgatgtgacggcagccggcgtccagcgaggcatgcagggtttcgatgccgacctcgtggccacgattgttttcgatggtcagcggcatttcgccgtggccgatggcggtggtggagaacggtccgaggttacggaacaatgccatggtgattcccttcaacagtaatgagacggtctgtgtccgattccagcgtaagcagaacgctggatttaccgcccgccgaacgagccgccacccgagccaccgaacgagccaccgaaaccggagccgccgcccgagccgaagctggagaaatcgccaccggaatcagcggatggtgctgccgcgctgatggtcgagctgatgtcagcgagtccggagttcagctgcgagccgaggtcggagaatccgccggcaaacgacgtgcctccgtaagccggagctgggccgctaatgcccgggtccatctgcccggcagcatcgtggtcgaacggaccattatggcggtggctgtaccagccatacgggcggtagttccagtagaacaacgagttggaggcgttggcatccagccaagccggatcgttgacctgaggataggccttggccagctcacgcatcacgcgatcggaaatgccaaacgcggcggcgtagaccatataccaatcccacaaggccaaatcggcggtaccacggtcggtgaagttggagaagtcttccatataacgcttaaggcccagagtccggccggcgatatcctgcccttgatcagtgagcacggtcaccgcgccggccatcgagcagaacaggccgaccaggaatatcggcagcccgataagaccagccaccgggtatccgataaagctgttggccagcagcgaaccaaatcccagcacgacggccagtacgccgggtaggatccattgccagcccacagagcgcgtggcacccagccgctggtattccatgctgcatgcaccggtgaatttgccgagctcaatatagccgtcttgccagttctggcaggtcgccttcatctggttcaggtcgaataccgggctgcccacgcgctgcgaaatgacgatgagcaggttcagcagcgcatcttccgattcgctcaatcccaactgttgcgcgttgggtgcctcatcaatggcgagcggcagaatcacgatggtgctggtgatgcctgccgcatactgcttgccttggtcggcggcaatcatttggctcaagcccaccggcgtggcctggctcatgtcgatgccgcgatacatgtccgacggccccggatagacggcaatggccttcttgacggcgagcgacagcatggtggcggtcagctggcggtcttcatcggattggcgcgtcgacggatcgaccacgcgaatcagacgggctgcggaagccggactgatgccgggctggtcgcgccagtattcgacgctgccacggtattgcgcacgccggttgctggagatcacagcccagataccccacgcgcacaacgcgatgccgagcacgatgctgacaatccagaacacgagacgagctctggcagcgaatcgttgcttgtcgagccagcgctgctgttgcttatattcgtcctgtttcaggtccttgagatgattgccggttcccttgcgggcgatgcccttggctttggcggcatcgaacgccgcgaccacatcgaggtagtcgccattgtggatgttgtaggccgtgaacgtgtagctgccgtcgctgttgcgcttggtttccgaagtgcgctcggtgtgcagccatgcccatgaggttttgccggtgatgccgttggggaagtggacggtgccggtgaccgtgccgataggcacttggttcttcttgccgaacggctcccattggaaggaggccacgtctttccatttggtggccacatcgtgcatggtgaagctcacgtcgaacttcatactgtcggcctcggtggtgaccggaatattccagccgatctccacggtcgtgtcatcttcggtggcggaggcgctgggcttgaggccatcggtaccgggcgtgtatgcctttggatggtcgctgccatcgctcacatcggcgatataccaatggttggcgtagtcactgttccattccttgtcggaagagacgtcactgggcagcttgggctcgctctgttgtgcgtagtcgatgccgtcggtgacgttgcgcacgctgatatcgctgatatcagtcaaggtgccggagttcagcgtgtattgctggaacagctgcttccacggcttggtgttgtcgtcactgtcggtacgctcacgcatcttgacgtcgatatgctgcgtgaccttcaaatcaccgttcgcggtggcggtcacgtcatagtccagcgtgcggtagctgaggtcggccgaatcgccgaacgcggaagtcccgattatcgccaaggtgataactgccaacaccaccgtggcaacaatgctgatgattccggcgcgaatgaatcgtatccgcatgtcttccctctcttaaggcaatacgggcccggccggcggcataccggacgggcctggagcgggtcagaactggacctgtggcacctgacgggaggcatcatcggcctcgaagtattgcgcctgttcaaagtggaacaaaccggcgatgatgttcgtcggcacggtttcgatggcggtgttgagcttcaggaccacgtcgttgtagatctgacgggcgtaggcgatcttgttctccagttccttgagctggttctgcagatccatgaagttctggttggcttgcagctgcggatatgcctcagccgtggcttgcaggttgaacagggcgcgggacagctggttttcagcggcggcgcgctgagcagtggtcgtgctcgggttgctggccgcagccactacgccggcgcgggcggcggtcacctgagtgaagacttcagactcgtgggatgcgtaccccttgacggtattcaccaggttcgggatgaggtcggcgcgctgcttcaactgcacgtcgatttgcgcccaaccgttcttcacacggttcttcagcgtcaccaggttgttataggcgctgacgccccaaccaatcaagacaacgataataacgacaacgacgatgccgacgatcagaccagtactcacctatgctcctttgctggacctcgctgcgaccattcttccatactcgcacgttaacagaaaattcatcacggagtgttcatcgtgcggacttgtcttgtaccgctttaccgccgttctcccgtcgatcgaccgaagcaggaaatcgccgcccagtccgacaaagtattccagctcgctccgttacgagaacggtaatactcggcaatactcgcgctgaatatgcgaaagcccgccttgcggcgggctttgccgtttctcctacgcacaaatcattacgctgcgcgcaggaaacgatcagccgaaccttccagagatgtagcgctcggcttcttcgttttgcgggttgttgaacatcgtgatggtgtccgcgaagtactcgaggtgaccgggctggcccactgccttcaggttgaagaaggcggtgtagtcggcgatacgggcggcctgctgcatgttgtgggtcacgatcacgatggtgtagtcgctcttgagctcgttgatcagatcctcgacagccaaggtcgaaatcgggtccaaggcggagcagggctcatccatgagcagcacctgcgggtggacggccacggcgcgggcgatgcacagacgctgctgctggccaccggacaagccgatgccagggttgtcaagacggtccttgacctcttcccagaggttggcaccgcgcagagcccactcgaccagatcgtcggcgtcggacttggccaggtggtggttgttcaggcgcacaccggccagcacgttctcacggatggacatggtcgggaacgggttcgggcgctggaagaccatgccgacgtcgcggcgcacggccaccggatccacgtccttgtcgtacaggttcttgccttcgagcagcacctcgccctcgacgtgagcgccggggatgatctcgtgcatacggtccaaggtgcgcagcacggtggacttgccgcagccggacgggccgatgaaggcggtgaccttgttcggctcgatgttgatgttcacatcttccacggccagaaagtcgccgtaatagatgttctcgtggttgacgtcaatacgttgtcccatgatgtttccttatatttccttgtgttcttaaggcttaggcttagcgactggcttagcgctcggtcttgacggcgaagaccttcgccacgattcggccaatgaggttcagcagcagcacgatgacgatcagcacgagagccgcagcccacgcacgttccatcggaatcgtggtcacgcaggtggcgtcggcgttgggcgggcagttcgcgctgagcttcgagtactcctggtagacgaacaccggcagggtggtcatctggccggagaacaggttcacgttggtgctggagatgtagccggcggtcatcagcaacggtgcggtctcaccaatcacgcgggcgatggccagaatggcaccggagacgatgcccggcagagcggtgcgcagcacgatcttggtaatcgtgcgctgcttggtaacgcccagagccaaggaagcctcacgcaaatcgttcggcacgatcttgagcatttcctcgctggacttgaccacggtgggcagcatcagcagggagagagccacggagccttcgaaaccgttgatggtaccggggcccagcagaatcgtgaacatcgagaaggcgaacaggccggccacgatggacgggatgccgctcatcacgtcgacgagcagggagatcgtggtggcgagcttgccgcggttcgagtattcgaccaggtacacggcgcacatcaaaccgatcggaatggagataaccatagcgccagcggtgatttcgagagtaccgatgatggcgtgcagcacaccgccgtaaccaccggacggggtctggctaccaccgaccacaccggtcatgttgtagctcaggaagttcaggttcaggcgcttgatgccgttgacgatagtggtccacagcagggagatcagcgggatgcaggcgatcacaaacgccaccgcgatcagggcccacatgaagcggtccatgatattacggcgctggatggcggaacgggtcgggcggaaacgatcgaagtcgatttcgggcgtgccgtccatcggagtcttttcagtgttctcagcagcagtcatcacgcagtcgctttctcggtaagcttacgggcgatgaagttgaccacgaacgtgatcaggaacagaatcagaccggttccgatcagcgtggagacgcccagatcgttggcttcagggtactgtgcggcaatattcgcggcgatggtctggttctgcgaggcctgcagcagcttgatggagtagttgaggcccggggacaggatcatcaacacggccatcgtctcgccaagcgcgcggccgagagccagcatggaggcggacacaataccggacttgccgaaaggcagcacggccagacgaatcatctcccacttggtggcaccgagcgccagcgcggcctcttcgtgcaggcgcggggtctgcatgaagatatcgcgggacatggaggtgataatcggcaaaatcataacggcgagcaccacagccacggtggcgacggtgcgcgacgggttggcggccgggccctcgaacagtggaatgaagcccaggtggttggcaacccagttccagaacgggtagatggccggcaccagaatcaggccgccccacaaaccgtagataacggacgggatggcagccagcagatcgaccacatagctcagcgcggtggcgagcttcttaggtgcatagtgcgaaatgaacagcgcaatgccgatggacacgaagaaggcaatcagcagtgccagcaaagacacgagcacagtaccgaacaacagcgggagcacgtagccccagaagctgctggccttgccgccggtaaagctggacacggtctggctgttggcggcctgatcgccaccgatgagtggccaggcgcggaagaacaggaacaggaacacagcggcaagtacaaccaggatcaggatgccgcaggcgtatgccacaccgcgaaacaccttgtcggcggtcttgccaccaactggctgcacagccgttttgtcttgcgaactcacggattctccttatatagggtggttatcaagtattcaagtggtgcggttttcgtctgtgacgttgccaaaccgttcgggtcctgacccgctttaagccgcagccgtatggtttacgactgcggcttaaagttggcggcgactgctcttactactacagtctatcgttcagttgtcaggtccagtccacacgacccttgcgggccgacgtcatcacttggtcttgatggcctcgatggacttggtgatctcggacttcagggaggagggcagcggagcggtgccggcggcatcctgagcggccttctggccctcgtcggaggtcacgtaggtcagccaagccttggcgaactcagcctgcttggtgtccttgtaggccgggcagacgatgtcgtaggagaccaggacaatcgggtaagcgccctcggcctcggtggcgtggttgatcttgatgacgatgcggttatcacccttaacggtgtcgtcctgcttggaatccccaatgaccttggagccggcctcggcggaaatctcgttgtacttgtcgccgaccttgacggccacggtgcccaggtcgccgacctgagagaagtcagcgtagccgatggtgccgtcggcctgcttgacggtggagatcacgccagaagtgcccttggcaccctggccaacctcgttcggccagttctcggagaggtcgtaggtccagttgtcaggggtgacgtccttgaagtaggagacgaagttctgggtggtgccggacttatcggagcggtgcaccacggtgatggcggtgtcgggcagcttcaggtccttgttctgatcggcgatggccggatcgttccacttggtgatcttgccgtcgaagatcttggcgatggtggcagcgtccatgttgatgtgcttgccggcatcggaaacgcccttgaggttgaaaaccacggcgatcggggagatgtagaccgggacatcgaaggcggtgccttcagtgcacacggacttggactgctcaacttcgtcatcggcaagggccttgtcggagccggcccaagcggtggcaccggtcaggaaggtctgcacgccagcgccggaaccggacgggttgtaggcgatcttggcctcagggttggtgccctggaagccggcgatccaagcttcaacagcggcctgctgagaggaggcgccggcgcccgagaagttgccggagatcggggtggacttggaagtggaatcggaggaggagctgttgtcggtcgtggtggcggtgttatcgccgcaggcggccacggaagcgagcatcacaatgccggacagagcggcaatggagcgaacgaggatgttcttctgcatgattattacttaatccctctatcaactattcgcgggcggctcagcgctgcccggtcaattcatgacaactacaagcgtattggtggtttcaagggcccaaaaccgaaatcagtaaacagaagatgaacacttggatgtttgtgggctacgttgaggctacgtagtttttggagcgggctcgcctgcggcgagcccccccaatccacaacaaaaaaggcgacccgaaggccgccttccatttactccgcgggagtatcgatcttgtatccgagaccgcgcacggtagtcagatacttggggtgcgccggatcttcctcgatcttggagcgcacgcgcttgacatgcacgtcgagcgtcttggtgtcgcccacataatccgaaccccagatgcggtcgatcagctggtgacgcgtcatcacacggcccttgttctgcatgaggtattcgagcagttcgaattccttgagcgggaagaacacggtttcgccgcgtacggtgacctgatgctggccaacctgcatgacgatatcgccacacaccagcggaatatcgtcatccacagtgccggaagcctgggcagtggcctgattgcgacgcatcacggcacgaatacgtgccagcagctcacggaaagagtacggcttggtcacataatcgtccgcaccaatctcaaggccaacgaccttatcgatttcggcgctcttggcggtgagcataataatcggcacacggctctgctcacgaatgcggcggcacagtgcagtgccgtcaatgcccggcagcatcaaatcaagcagcaccaaatcgatgccgcccttggtgaacagttccagaccttcctcgccagtggcggcggcggacacgtcgtacccctcgcgtgtgagctggtataccagcggctcgcgataggattcctcgtcttcgacgataagaatgcgtgtcatagtagcctttcttgggtatgttcccgtgcgcataggcgcaaagttttccgacattatcgtaaccatttgttctccgttagcctgctgtttcccgaaagtacgtaattgcgtaattgggctacgcgcggtgtgcgcacctcgcccactgtgtgattgtgtggcaatggaatggcaccatgtcgggcaccaaccaaggccctacgcttgtgtcgactcgtccgaccgggcctcgtcgtcatcctcatccggggcggccggcagctcgatggtgaacgtcgacccctcccccgtacgcgaccagaccgaaatccgaccgccgttctcctgcacgcagtgcttggtgatggccaagccgagtcccgaaccgccggtctcgcgcgaacgggccgggtcgacccggtagaatcgctcgaaaatgcggtccagcgatttggcggggatgccgatgccctgatcgaccacgcgaatggtgactttgccatcgcgctcccccacgccgaccgccacagtggtgtgttcgggcgagtaatggatggcgttctctacgaggttcttgacggcggtttgcatggcctctttgtcggccttgatcatcggaccgttcgtggctgggctgcctgattcttccaaggaaccttcgccatcggccggctcctcgaccttcgtgggtactgactgtccgttgacactcagtcggatatccacatggcgggagtcggcttgggtctgattggcggcgatggcggcgcgtgccacatccagcgcggaaatgcgccgcgcatcgatcacgctttgcgggctttgggctttctgcaagtcgataagatgatgcaccagttcggtcaggcgcgcggattccttggagatacggccggaaaaataccgtacggcgtccggatcatcggcggcgtcggtcacggtttcggccagtagcgcgatggcaccggccggagtcttgagttcgtgcgaaacgttggtcacaaagtcacggcggacggcctcgaaacggcgctgctcggacatgtcgttgatgaagatggcgtacaggtcatcgccgatatcgccaatgcgcacacgcaaatacagcgtgttggacgggcgtgactggccggcctccagtcctcggccattagaggacggataggaattgcgattgaccggcagctgaacctcacgctcacgcatgccaccgtcggcggcggcctgagtgaggatgtcctcgacttcacgcgagttgagtcggtcgccggagactaggccgaatggcactgagccggggcttgaatattggaccagaccgttgcggtcggtgacgatcagggcttcgggcaggacttcaatcaggcgacgctcggtggggcgcacgggcgcatcatcaccgaatagagaatgcgtatcctcgtcgccggacaggtcctgttcggcggcgagccggcctgaaacgcggcctttgttgtaggcgatgacggcaacccacaccagtatcagcgcggcgagcaccacaatcacgacgatctgccagatatccatgatttccagagtaaaacgtgcgaggcgtagtgagatgcctaaactacgtaagttcgtctattgttcatttttggcgggacgacataacaaaatgctcccgctggcgggagcataatatggggagctctatttacagctcgtagtccttgtccttgctttccttgatcaggaacagagcgagcagagcgagggcagtcatgatagccatgtaccagcccacaccggcaacgccgaacttggaggtgaccagttacaggcgcttgacgatgtcgacagccagacgggcggcggtatcggcgtattcggagatgtcgaactccttgaatacctcgtaatcagtgtcggcgttgtcggaaagggcacgaatcaccagtgccggcacgttattgcgggcggcgacctgtgccacggcggcgccttccatctccacggcgtcagccccggtgagtcggatgacctcctcgaccttttggggcgtgtccacgaagtagttgccggaggcgatgatgccggtgatgtgggtaatgcccgcattggcaagcgcctcgtcggcgacttccagcagacggtcatcagagtggaattcctccaccggagcgtccgcagtgccgggcttccactggcctacgagccgcatgtcagtgtcgaggtagcgcagggtgccgccgagcaccacgtcgttgatgtgcaggtgggtgttgaggttgccggcgatgccgctgaaaatcacggcgtccggggcaatctcgtcaatcagcagctgcgtggtggcggccgcattgaccagtcccatgccgcctaccgttgcggcaaccttgatgacgtcagaaccgaaggagtcgaccgtgccggacacgatgtcaaggctgcccttggcggtgtgcgtcacatgcgtgagcgatttggcgatcagcgccacttcctcatccaatgcgccaataatagctacagttttcatacccatacgtaagttcctttcacaacactttcggctccccttgtcaggggaggtggccgccgaatggcaggctgaggggtagagacgtttcgttgcattgctcccgcgagagagccgatgacgcaactcagtgccaacgccgtgtggctacggcttccgcaagctcgcgcagcaaggcctcggtttcttcccagctgatgcacttgtcagtaatcgacttgccatagaccagctgatcaagcggcgcggccttctgattgcctccttcaataaagctttccatcatgatgccggtaataccctgttcgccagctgcaattctgctggcaatattgcgcacgacttcggcctgacgatgttcgtccttgccggagttaccgtgcgagcaatcaacaatcagaccatgcgaggctgcggattcggcgggcatttcggcgcgtacgtcttccatggctttggccacggattcggcatcgtagttcgggccgtgaatcgagccgcgcaacaccacatggcagtccgggttgccaagggtctcgactgcgcaggcacgccccagatggtcaatgccgaagaacgtgtgctgctgagcagcggcgaagcaaccgttgaccgctgccttcaccgagccgtcagtggcattcttaaagccgaccggcatggaaagcccgctggccaattggcggtggatctggctttccgtgttgcgcgcaccaatggcgccccaactcaccgcgtccgagatgaactgcgggctggtgggctccagaaattccgtggcggccgccaatccttccttcagcacaccaagcaaggttttgcgagcaagcaacaggcccttgcgaatattgtggctgccatcaatatccgggtcgttgatcaggcccttccagccaatggtagtgcgcggcttctcgaagtacacgcgcatgacgatgagcagctgttcaccgagctcatctttcagcttggccaatcggcgcgcgtagtccagcgcggccttcgggtcatgaaccgaacaggggccgacgatgaccaacagcctgtcgtcttggccgtacaggcacgcgcgaatctcatcacgcgagtaggcgacgatttcctgagcctgatcagtcagcgggagttcagcgagcacttgcgcgggcgtgggcagcggctccaactccaatacgcggcggttgatgatgcgactgacacccacctgatcttcccaacgcggcacatcagtggcaacgagcgggttcttcccctcccccatcgcctgacgaatggcgcgaagctcttctggggtgttcaacggctgcggaccgacttgcaacggatgcagcgaatgtgctgcttcctcctgctgctgcataacatctctccttgggtcagtatccttcccaaggataaggtgtcacgggaacaaactgacatgaccaccgttattggcaaaaaatgctcactgagtgggtctcagtgagcatttttacaaagacaaagctatttagccgagcggcgagcggtgacggcgtcggctagggtgtgcagcagttcgttggtgcgttcccacggcacgcaagagtcggtgacggactgaccgtagaccaactggtcgagcggggccggcttttggtgaccgccgaccaagaagctttccatcattacgccggtgatgccttgttcgccgtgcgccaggcgctcagcgatctcttcgatgacttcggcttcgcggttttcgtctttgccgcagttgccgtgggcggcatcgatgacgaggccatgctggctcgggccggacgctttggaaaccttgaggtcttccagagcttgacgcacggattcggcatcgtagttcgggccgtggctggagccgcgcagaaccagatggcaatccgggttgcctttggtttcggcggaaatcacgcgaccgtccaagttaatggacaggaagtgatgctcgaagccggccgcgaaacaggaatcggcggcggccttgatggagccgtcggtggagttcttgaagcccaccggcatggacaggccactggccagttcgcggtggacttgggattcggtgttacgcgcgccgatggcaccccagctgatcgcgtcgcagatgtactgcggggtgatggggtcaagccattcggtggcggcgggcagaccgaggctcagcacgtcggtgagcaccttgcgggccagccacatgcccttacgaatattgaagcgaccgtccagatcggggtcgttgatgaggcctttccagccgatggtggtgcgcggcttctcgaagtacacgcgcatcacgatcacgagtcggtcttccaactcgcgcttgacggcagccagcttttctgcgtactcgtgcgcggccttcgggtcgtggattgagcaggggcccacgatgacgagcagtcggtcgtcgcggccgttgagcacatcgcggatttcctgccgcgagtggagcacgagctcgctcatctcatcggtgagcggctgctccctgaggaaagcacgcggcgcgggaatggggtcaagctgacgaatgttgacatcgacggtctcaggaaagacggcctgctcccccaaacgacgttcatcctcggaactatccggaccacgtagtgctgccattgctcgactcctttccttgtatacgtactgtcggtatgtcgccatagacgcaaaagcccaactatagcagtttgttacggggactgcttgttgggccggcagttatggactttgggtggactcgcctgtgtggactcgcctgcggcgatgctgtgttgttgtgcggcctgcgactgcggtctctccctctgtcagcggcttcgcgctgacagagggagagaccctagcagccgacaggctgcgagaaaacacagcattggccgtcaggccgattccgggaggctgacgaagtcaggccaaagcgcccatcggatcccatgcggggagcatggtggctggctcttcgagggccttctggtattcctcgggcaacagggccttcgggacggctacctcgtagacgtattcggtgaaccagtcgtcggacatggtgaagtagcccttgtcggcgatcttggcgccccaagagttctccacgcgccagcggcgggtggtgccgtcgtcggccacgtcaacgccggcgaaagccatggcatggttcatggcggagtcgccgaagcgcacgcgggcttccttgtccaaatcgaagtccacgtcgtacacgcggccgtactcgaacaggtcggtggcccaagcgccgttctcacggtccatgaacgggtggcagtcggcaccgaaccataccggaatgccctgctcaacgagaatctgcttgacgcagtccttcatgaactggtttggcacgttgaggtactcggtggcgtcgccgccagccacattgccgaggtgctcgatgccgatcttcttgcccttggcgtgctcggtgcgcggatcgtccaccaggcacacgtagtcctcaagatcagccggacccacgtacttcttccagaactcaaccggcgtaatctcgccgtcgcggtggaattcgccatccttgtcggtccattcccagtcgaaggaaaccggcggctcgcccaggtggatggtcagaatacggtggccggcagcagtggcgtcggcaataatcgcctcgaccttggaggcatcgccgtcagcggcgtacatgtgcgccacggcggtgtgcagcatgtggcgcagctggatgttcatttcaccggtgttcttggaggattcggtctccgggaacaggtccttgggcacagcgccgtacttcttgtacacgttcatggccatggtccactggccgccatcgcccatcacgtcggcgagcaggtgctgcatcaggcgggagtcggaaggctctccggcagccaccagagcggccacatccttaaggaagtagttgacgcgctccagcttgtcgtagtacatcgcgtagttctgggagaactcgaactccttcaagttcatgttcttcttggccacgaaacgggccacgttcagggagctgaacagccagcagcggccggagcgatcctgatgggtggcttcgccattgtcaacgatggtggagaaacgacgctgcatcagacgagcgcggtcataattgcgagccaccttgtcgatgccggcggcggtcaccgcgttcatggccagacggttggtgccgctctgtgcgaaatcgccgcgcagggtattcaacgcttcgtcggtcagaggcgtcaattcactcatgtcatactccttctgtgatggtgcgcttgtggcgcagattcaaacgaatacggcacctggctcgaaagcgcaggtgccgtaattcttaccgctagtagtctaatcgaaggcctgtcattcgccgttctgctcagatacggccggattctcctgagtcggggcctccggttcgccctgtgtctggtgctcggacggctcagacgattcggactgctcattctgcgcagccgaatcagccgaatcagccgaatcagccggtgccgcatctgtctcattgtgatcgtcggcagccgactcgtttccgctcaactcacccggctggtcatcggcctcgttgtgtacaggcttgacttccgggacgggcgcagccaccggcaatgccgccgcggcagcggcttcctgatcctgaccagaggccgccgcattaccgccgaaagcgaatccggagaacgcctgcgagaacatagaacgcagttccgaaacacgctgggtgatgacggactcgcgttcctgcagatcggcgatgcgcttggacagaccgtcaagctcgctttgggcggcggcgcgacgctcctcgatctgcgcatcggcttcctcgcccgccttatgtacgattgcggcggcctggatgtccgcctcctcgcgcttggacgcggcatacgaatcggcttggtcgcgagtgttcttggcctgaccgaccaactcatcggcttcccgcttggccgccacacgacgctcttcgaggtgctgcagcagttcgttgaccttcttcgtggcctcatcctgctgagcggcgatgtcgtgacggatctgctcgacctcggcgttgacctggctcatcgtgctggtgcgcttgacctcggcctcatcagtgatttcctgacccttggttttggccgcatcaatgatttcgctggccttgcgctgggcttcggtcatcatcttggacacttgctcgcgcacgtcggcgagcttcttgttggcctcggcgagcgccgcctcaatctgatcgttggaatcagacttaagcttggtgatctcctcattggcgcttttgcgcattgcggcaacctgctgggtcgcctccgccttcatgtcggcgatttcgcgctcttgagtggagcgttcggaagccatcttcttggtgtgctcttcgcgcgcgttgctgagctcaagctcgacggtctgacgctgttcggtgatggtcttggcagtttcggagcgcagttgtgcggcatcctcgttggcggaggtggtcactgattcggcctgattgctggcgttcgtcagaatcgaggcggccttggcattggcgtcgtcaacaatatgctgggcatccagcttggcgttgttgatcagtgtttcggcctgagcctgagccgtggtacggatggaggacgcgtcctgcttggcgcgttccagcagttcggtactcgtctgttcggcggaggcaagcatctgctgggcgttcgctcccaaggaagcgaagctgttgccttccggcttcttgttcttctcttcctgaagttgggcctgcagttgcagaatacggtcgtcatccgccgcaatctgctcacgcatgctggccaacgtctgctgcgcacgcttcatactctcctgagtagcgtcgaaggcagcatcaaccttctccttgtcatatcctcgcagcaccaccgggaaacgatccaccatcgctgtttattcctttcgcacacgcataaagctcttggcacatccttgaagcactgtagcgcatcgcactagcgctgagcgttgagcgacgcgcaatcgttacaatgcgtgcgaaccatgttctattccggcgtggcgcacagcgtgctaggcgatgaggatgtcggagctggagggcttgagatagtagcgcacggcttcgcgcaccacatcacggccagcggcgatctgctggtcgagtggtagaccatgctggctggaatgcgccggaacgaccggagggaagctgacgaatccgcccagcacctgctcctgggtggcggtccagttgagcaagttgtagaacagcgaattacatacgaacgtacctgcgtccgaactcaaggtggccggaatcgaatcgtccgtgaaatcattcaggatcgagcgcaacggcaggcgggtccaataggcggccgggccattgggatcgatgggttcgcggcgtgggatcacgttgtccgcgtctggcttgatcgcgtccatcaggttggtggcgcatcgttcaagcatcacgcctcgggctgcgtgcttgagcccggtggcgatgacgatattgggcttggtggcctcaatcgtctctttcagcgtgggccaggctttggcgaagctcaccgggatgctgacagcatgaacggtgacggcgacctgctccaacggatcgtccggagcagaggagacgcccagtccctgctcggcgatggccttgggcacttcgacggcgggattgacctccacgccgtcatagtggtcgaagccggagatcacaacattgagttcacgcataatgccagtctagcgatgcatctggccggccgcttgggccagcagggcgtgcatgcgggcgcgggcctcttccttgggatcacgaccgagaatctcctcggcgatacgctcagctgtgggaatatcttccagcgtggtgatcttcaggttggtttccgcaccggagacaatggcgacgggttcatcaggcagataatcgaccactacgcgcgtgtcgtcggtgggatggaagtccgggtcggcggcagccaaatcgtaagcgtgacgaatcgtcgcgaagcggaaggattgcggggtctgcgcgcggaaggtgttcgggcggtccggcaccgacttgaccactttcaaatcgcccagatcctcggtcaacagcacggtgtcggttgaggcgtaggccacggttgcggccgtgaactggtcgagcgcatcaatcgaaccgtcgatggcggactgttccacgaacggacggacggcgtcatggatcagaatcttggcatcgtccggaatgccagccgtagccagcatgtcgagcgcggtggcggtactgtccacacgctcgtcaccgccgtcaatgatgacgcggaccttggtgtagcccatctcgccaaccaacgtttccacttcaccgcgcaccttgggattgaccaccaccacgatgtcgctgacgcggtcgcaatgttcaaaggcatcaatgctccagcacacgatgggcttgccgcccacggagacaagctgcttgggattatcggggtcgaagcgcgtaccgaagccggcggccagcaccacggccaccaccggcacggtttgcgccggtttggcgccctgagcgggggccggctggacggtaggcgtctcgacgggggtatcgaaatctctctcagtcataggcaccaccgtagggtgagggctggccgtccgtgaactgcatcacatcttctccacggaatgtgctcgcattctccgtttagtcacgcacgatgagggcgaggaggcggccttcgtgtgttttgttggcgagcgcggcgcggcggtgcgagtaccacagtgggttttcgagcgtgcacatgctgtggctgatgttgtcgatgcgctccgcgagctcggccgggccttcgccatccgtacggcacagttcggcgagttccgggtcttcctcaaggtactgggtggcggcgtgcacgcgcggcatcgaatcgaccacctgatgtacaccggcgaaagcgaggtcgatcatcgcggcttcggcgatgtcgatgccggcaccgccgaaacgggtcttcgtcttggtcagcgggaagcgcttgatgaactggtcggcgatctcgtcgcccacttcatagcagtcgccgcagatgcgcgggccgagtgtggccacgatgttcgccgggtcggcacccttgctcttcatcaggtccaccgtggtgccgatcacgccgcgctccagaccacgacggccgcagtgggccgcaccgatgataccggtgaccgggtcgcccagcagcaccggcagacagtcggccgcgaacatgcctagggcgatgccggattgtgcggtgacctggccgtccgcctcgatgacgtgcggagtgtcagtctcaccatgtgtgccggacacgtcgaagccgaagggggtgttgatgacgaacgagtcgtccacgtccacagccacgccggaatgtacttgggagaccagcgataggcgggcttgcaccgcttcggcgagtgcgatgcggttcgacagcacggcctcaggttcgtcgccggacttgccgccgaggttcaggttgccgtaatcgccggtgctcaggccgcccagtcgcgtggtgtacaccaccttgatgccgggggccagtgcgatggggatggtcaccggaatagggcgaccggctttatcggtagagctgatgctgttggaatcgaggatttcttcgctgtattcaggcataaggcattctttcttgggtgcgggcggtgttcatgattttcatgaccacccccagtcagcgggggcggagtggtaggttattcggctttgagggtgggctttttggtgcgcgagcggatggcggcgttgatgggcacctggtgcgggcagggcatcgagaacacgtgcgccggattattgatggcgggtactggcgcgccatcggcatcgcgcaggccggtttccggcacggtaaagaccaatggtctctcgccaggcagcaggaattcgacctgttgaccgggctcaatcttgttacggctcatcagcgtgacacgtccgtcttcgtccgcgctccagctcagcacttcgcccactaccagccatgagcggaagtaggcggagcggtcggtgttctgtgtgaccttgtgctccgggtaatagaagccggtggagtagtcgcggtgggccaccttgtcggtttcctcgagcagccattcgggcagttcgacgtgtggggccgggcgaacggccgcatgtttccaatcggtctcaatctgttcgaccgcggtgttggacttgcggcgcgtggaacgggcgtgagagctcatgccgtcgggttcgacggcggtgccggccggcgtaccagaggcagttgagtcgacggcatcagcaaccgtcacgcggtcacgttctgcggcaaccgagccggtgaccgaatcggcaaccgcagtatcagagccacggtcatatccctcatcggccacaccggcgaacgcggcatcagcattgcgcatcacttgatcttcggttccttggccaaaatcggggtcgcccgggcgaatcacacggtcatggaaaggcttcaaaacattgccatcagcgtcttcaaaaccgcgttgaatcatgtattcattaaccgcggttttgtaggcgttggtcatggcggcgatatagtaggcgcttttcgcgcggccttcgattttgaggctggtggcaccggagtcaatcaaatcatccaagtgccccagcatattcatgtcctgcgaattgaacagataggcgccgttctcggtctgctcgatcgggaagtactggccggggcgcttctcttccacgatcgaatacttccagcggcatggctgggcgcattcgccgtgattgccatcgcggccggtcagatagttggagaacaggcagcggccggagaaggccatgcacatagcaccgtggacgaagcattcgatgtcgaggtcatcgggaatgttggcgcgaatatcacgcacggcctgcaagtccatctcgcgggccaacaccacacggcgagcaccaagctcgtagaaggcgttcgcagcctgataattagtcacgccggcctgggtggagacgtgcagttccagattcggagccacctgacgggccatcatcatcacgccaatatcggagacgatcagcgcgtccacgccggtgtctttgagctggccgacgtactcgcgcatggcttcgatctcgttgttgcgcggcagcacgttgcaggtcacgtacacgcgagcgccgcgttcatgggcgtagcgcgatccttcctcgaaatcctcaaggctaaggtttttgggggccgatcgcatgccgaaggctttgccgccgcagtagacggcgtcggcaccataatcgaccgcggttttcaggcccctcaggttgccggccggggacaacacttcgggctttttgcgggtggggaggttcatcgtcgtattcatcaccgcaatagtgtagtggtggccgtgtaatgcgggaggggctaccgttaggctggatgacatgaagatcgatatcgtgagcgtgttccccgaatactttgaggtgatgaacctcagcctgatgggcaaagcccaggccaagggattgttggagatcaaggcgcacaacctgcgcgactggacccacgatgtgcatcattcggtggatgatacgccagtcggcggcggggccggcatggtgatgaagcccgaagtgtggagcgaatgtctggacgaactgctgggattctcgcagccgtccggctcccccgccccatccggcgcaccggtgctcatcttcccgaacccatcggccccgttgttcacccagcgcgacgccaccgagctcagccatgccgaccatctgctgttcggctgcggccggtatgagggctacgatgcgcgcatcccggactactaccgcgcccaaggcgtcgacgtacgcgaatattcgatcggcgactatgtgctgaacggcggcgaagtagcggtatcggtgatgcttgaggccatcacccgcctgatgcccggattcatgggcaacccagattcgattgttgaggaatcctacaccggcgagggcgcactgcttgaacatcgccagtacaccaagccggccgtgtggcgcggtattgcggtgccggatgtgctgttgtccggcgaccacggcaaggtggaccgttttcgccgcgacgaagcgctggcccgcaccgccgagattcggccagaccttatcgcggcactggattgcaaggcgctggataaggccgatcgcaagaccctgatggccttgggctgggaggtctccgccgcccatccgcgccggctcgccgattaattcaccacacggtgggagattcactacgcggcggaatcgtcggaacgctctatatccgagtcgtcatccgcggattcgatgtagaagacggcggtttcgccgtagttgcggctttcggtgatttgccagcctccgggggcagtgggatcatccgagcgtaccgagcgttcgagcatgatcaccgtgttctcgttggtggcgctgcccgccgccagatcggacagtagctgattgcattcagcggtctcataggcatagggcgggtcgatgaatatcacgtcgaatggttcgccgaagccgccagccacttgctcggcttttttgaccagcacacgggccttgagcgaagcatcccacgaacgattcttctgtagctgcgccaaggtcttggtaatcagcgccgccgcaggccgggaactttccacggccacgagttctcgcgcgccacggctcagcgcttcgatgcccaacgcaccagtaccggcgaacaggtccagtacacgggcatcatccagcactccccatgagtcgaggtgcgagaaaatcgcctctttggtgcgatccgtggtaggccgggtacccgttttcggcgtagcaagcgccacacccttgaatcgtccagaaattacacgcatagctttcactgtacaggttcatctgcgcataccaatcatgaacaacaatggggtgctcgaagcgcaccaatgatatatgcacttcgagtacctcatgtacgaatggtcttgcctccactgaagcacattcgagggcttcccgaccgtgatttcctcacgatcggcatacggaaaaactatatcgtgcgattacgggggcgcagccctagcctcagctggaggtgcctcagctggaggtcaggaaggtttcgttgcctcgggtgaagtcgaggacggcaccggcgagttggacctcacctgccagttcggggtcggcggccagaagctgcccggcacgggtgcgggcgtcggcgatcatgtcggcgtccttgaccacgcgcaggagcttcaggctggacttgccgccggattgggcgtcgccgagcacatcgccggcaccgcggaattccaagtcggcttgggcgatttcggcaccgtcgagcgagtggtgaatcacttcgagccgttgctcggccggggagccgggttccgcacgggaaataaggaacgcccacgagttggtgccgccacgccccacgcggccgcgcagctgatgcagctgagagaggccgtatcggtcggcatcaaagatgacgatgcagctggcctgcttgacgtccacgccgacttcgatcaccgtggtggacaccaggatcggagtctcgccgccggcaaaatcggccatgacctgggttttgacgtcatccttgtcgcggccggtcagagtcgcaaaccgaatgccttggaactgtggaagtttctgcaaccggtcggcgatttcggccaccgcatgcaatggcgggcgagccacggtttcgccattttcgtcgaaggtttcgtaggggtcgtcgatgccgatggcatcggccgccgcgcgcgttgcacggccgcccgcagctgtgcgggcactggaaccagatgctgcggcgcgtccgcgggcagaaccggctgctgccaaaacgccggaaccgccttcgttctcctcatcatccgcatcaatgcgcgggcacacgatataggcccgctcccccgcgtcgactcgcgcgcgaatgtgcgcgaacatacgccccatggtggcggcgtcggcctcattgaccaccacggtacgaatcggtttgcggccgccaggcaattcggtgagccaggaaatatcgagatcgccaaaccaagtcatggcggcggtgcgcgggatgggcgtggcggtcatcaccagtagatgcggcgtggtgccgtcatcggttttggcgttgaggctttcgcgctgttccacaccgaaccggtgttgctcgtcgatcaccaccaaggccaagtgcggggcttggaaggtcttggaaaacgccgcgtgcgtggccacgataatgcccggctcaccactggcggccgcagcgagcgccttacgccgggcggcaagcttcataccaccggtcagcagggtgacgggaatttccgcagtcaccttggaagaagagaccgtcgaagcaccggacgcgcccatcgcgccctcaacgtcggccgcggcatcggtctccttggcacccggctgtgcaagggtcaaccccgacaccatcttgctgatggtctcgtaatgctgttcggcaagcacctgagtgggagccaccagcaccgcctgatagccggcgccgaccgcctgcagcatggccgcgagcgccactacggttttgccggagccgacttcgccctgcaacagacgctgcatgggccagtcacgttcaagatcggacgcgatgtcgtccaccacctgactctgcccggctgtcagtgtgaacggcaacgatgcgatgaagcggtcgcgcaaattgggcaaattgggcagatcaggcagatcggtcgcagaaccgcgctccgatgcttctggttgcgtacttggctccgcaaccgcttcgcccaccgacgctcgagctgtttccagcgcctcgttcagcgggcaaggatgcgccgatgacttgtgcgcgtgctgtcgagacttcagcagcgaggtctgcgaaacgaaagcctcctcatagcgcagggtttcgatggcctccttgaaccgggccgtggaggccggatcatgaatggccaggaacgcctcagcccgatgcatgaggttcttggccttgcgcaccgattcgggcagcacatctgggatggattgggagagcgcctcagcaccggattcggcggtcgtgccggacttctcttccccgttttggacggcgatggtgtcagtcgcgggagccacaatgccggctgccccagcgccagcgagttgcccgtcaggcgtggatgacgtgcgggcccccatcatccacagcaatcccagaatcgtctcatgaatatgttcggacgagatacgcgaactggcgtgatataccgggcggggccggcagacgcgggtaagcgcctcttgcacggtatcggcgtcgtatttcaacgcggccccggaaggggcagtcgcggccggcggatacgcggactgcgcactggcatacggatcggcacttcccgcaaacgcaccattgccggatgccgcgccccgagcgtaaccctcaagccccgctcctgctccggccggcacgggcgcgacagtgaggatttcgggatgggtgaactgcagctgacccatgtattcgccgggcataccggagaccaccacagacgtgccggcgcgcagtcgcacgctgacccaatccacatacgatttacgatacgagaagaacgtgagccgggccgtactgccgggtacgcgacgagaccgggcgaagtcggcgtcatcgaccgtcgcttcgagtcggtagccgcggcgagcgttcatcggcaccacgcgcatatctcgtatcacggcggcaaatgccatctgctggccgggtgcggcctcgcggatggcgcgaagcggcaccggttcggtgacgcggaaaggatagtaggtcagggcgtcgccgacagtgacgattcccagcgatttgagcgcggacacgcgacgcttgttggtgaccagcgaagcgagagtggtgcccatagtgatgctcatattggcctattctattcgcacggcctctttaggccgcagaaacaacaaaacccgccaagccgaagctcaaacgggttttgctccacgttagtacgcgattcacgcggccacgcgctgaaccttgccagccttgaggcacttgacgcacacgcgcaggcgagtgttctcgccatcaatcgtggtgcgcacagactgcaggttcgggcggaagctacgcttggtacgacggtgcgaatgggaaacggtgaaaccggtctgcggtcccttgccgcacactgcgcaacgagctgccatgatggactcccttaaccttgatgtgtcaagtctttcacgcattcgaccgccggtttcacccgacatgccgaacacacaacttcacaaatatatagcccaataccgacaaccgcaactcttgcgtgtatcatgggcgaacctcggcggttcacgcgcggttcgagcgtaacttgcgagtgggccatcagcggttcacgagcggctcggcattggttcgccagcggtccgcaagtagttcgtcagcagttcgccagcggcgaattacgctgcaaatcatagcgtttacccgataaaacacgccggccttccttttccgcatccagcaaactctcatataatctcggtataagagacggcaagggacgaaggggtcctcgtgcaacttacgacgaaggaggctgtcatgttgaatctcaagcgaggtatcggcactcacgagcccagcgtgatttcactggggcaagtctgggtggacattatgctcaatgtggacaaggtgccggcacagggcggattcgccgtggccgatcatccgaagccctccattggcggcagctatcgcgtgctgcaggcggccagccgcatgggcgtgccgaccgagcacgccggcattctgggcaacggcctgtgggcgcatttcatccgccagtcattccaagacaacggcattacgcatatcggccaggatcgtcttgatgaggattccggcttccgcgtggtgctgagctccggcgcgccgaagaagacattcatcgcttcctatggcgccgaggctcatggcgactcggacacgttcgacacgctggagccgcagcccaaagacgtggtgcacatcagcggcaacacactgatggaccacacggccaccggcgtggacggattcctgctcaaggccggtaccgacccggctgcacgcgactacacgctggcgatcaaccccaccaatacgttgcgtttggtcaacgaccatatgcttgaggacctggtgctcgcacgcccggtctggtcctgcaaccgtcaggaggccatgacgctggccgagcgacttggtgcgccaatcgacgacagcaaagtcaccattggcggcggacttgacgacttcatgcaccagttgtgcgacggcttgggcgctacactgcgcgcgccgctggtggtgcgtgtcggcgcccgcggcgcttggattcgtgagccaggtggcgagacgattcatatcgagggatacccgaccaaggccgtacacacccgttcggcgggcggttgccacaccggcgtgatgtgcgcgatgctggcaaagggccatagtctggccgaatcggtaaagatcgccaacgcggcggcatccatcgccatccagcacagcctcaacggcgtgccgcaatgccccgattacgacgaggccatcgcgctgatcggcgaatagtcgactataggtagctccccccagtccgcttcgcggccagctcccctcagcgaggggagctatttttgctctggctccccttagaaagaggcccggcattattcatccgccgttcaaccggaatggctcccctaccctagtccgcgcttctacgatagattgagttgaatactgtcgaggagtgtatatgactgatcccacgaatgtccacgaaccggtgccgcaaagcgccaaactgaccgcccgcgagaagaagtggatcatctacgacgtcggcaactcggcattcgtgctgctgtccaccgccgtcatccccatttacgccaaatcgctgatgccggcggacggcaacatcgtgtccgcctggggctacgcgcaaaccattgcttccttggtcatcgcgctgctcatgccgttgctcggctccatcgccgacgtgcaaggcatgaaaatcaagttcttccttggcttcttcggcactggcgtggtcacctgctgcgcaatggccctgcccctgacctggctaccgttcctagtcgtctacattctggcgaccatcggcctcaacggctcgctaacgttctacgattcgatgctcatcgacgccacctcgaacgagcgcatggacaaggtctcctcgcatggctacggctggggctacatcggctccaccgtgccgttcatcttctgcatcgcgctgatcttcggcggcccgtcgctcttcgactggtccacggtggcttgcacgcgcgcctcgttcatcatcaccgccatctggtgggtggcattcaccatcccgctgcttaccagctaccgccaagtgcactatcgcgccacccgtgaccagctgggctcggccgtgcgcggcacgttcagcgaactggcgggcacgttcggcaaaatcgtgaagaacaagccgttgtggatgttcatgatcgcgttcttcttctacatcgatgccgtgaacacggtgatttcgatgagcacctcctacggtgccgagcttggcatcgactccacccagctggtggtggcactgctcgtcacgcagttcgtggccttcccctgcgcgattctctacggtcgtttggccggccggttcggctgcaaagtgatgatcacggcggcggtcgtggcatacatgtgcatcgtgttcttcgccgcgttcttcctgaagtcggccgtggagttctggattctggcgattctggtcggcatgttccagggcggcatccaggcgctctcccgctcgtactacggcaagatcatccccaaggatcacgccaacgagtactacggcttctacgatatcttcggcaagaccgcctcgatcatcggcaccttcctggtggccaccaccacgtccctgaccggcaacgcctcgctcggcgtgctctccatcgccgtcctgctcgtcgcggcactcgtcttcctgctcctgcaaaaggacccgacgcgggagtgatttgccggccctcggcaactctgtgccgagggcgacatctcgcagcatagaaatcctcgacatagggatgccgccgtttgaagtcggtatgtgacatgccgcccggaatcagcatcgccagcccgataatcacgcccacgcagatgcccaggaatgtcagaaaatcgttgagtggcgtcacgccgagaatggaattatcggaatcgaacaggttgccgatgccggctcccgcgataatcgccgcgacaccgccggcaatcagtagcgcgaatcggcagcggtgttcatcgtagccggtcagatcctgcggtaaggcagccacattagccagcgtgccgggacgtgatgaactggttccgtgcaacatttcgccgggcaatgcatttgcggagctcgggccattgatgccgtcaccgccggaccgcgctgattcaccgatgttcccatcagcatccttcatatacgcgggttccccggctccctccccggttacggttctggcagccgagccatggtcgccctccgctgcgccgcgcgcagccgcacccacgttcacgctcgcactcacatcgccaagtaccaggtcatcaagcgtgcaaccgaacaggtcgcagatcataagcagcttgtccatctcgggataggccttctcggattcccatttggagatggcctggcgcgagacgccgagcaacatggccagctgttcctggggcatgttgcgttgtgcgcgcaggtattgcaggttggcgcggaagctcatcggagtgtcccttcataggtaatgctcatcatgacatattcggccgatgccctcactatgccacggcaaaccagttccgcgccaccatcttcaggttgcatattcgcgcgcaaccacaggttgcatcggcggaatcccgccattctgccggctccgcggcattctagcccgcaccccgattggaccggcataatcggaatacatcgattatgaaaaaacgctcgcggccacatggccaacgagcgtgaatctcgggtgggcgatgtaggaatcgaacctacgaccccttcggtgtgaacgaagtgcgctagccgctgcgccaatcgcccgagcctgtgatgaaaaaaccggcaacattctgccggcgattcatcgagtgggcgatacaagattcgaacttgtgaccccttccgtgtcagggaagtgcgctaccactgcgccaaccgcccgggtcatcatccggtcgaatcaatcagcatgaatcaaccatccgagagcggacaacgggactcgaacccgcggtctcaaccttggcaaggttgcgctttaccaactaagctatgtccgcatgtgttaccttcacaggcaacaggtgacaaagatacgccaatctcaggaaaaagccaagcccccgcgtgtcccaccggttttccaacgattatcgagcgccgaagtgaagttcccgaactacgccgacgtgccgtccttcatggaatcaggcacggtatgggcttcatccctcaacgcgcgataatggcggtatgacgcaacgacaactgatgcgggccacagtcgaaacgcccatcggccggatgatgatggcctccgacggcgagggacttaccgaactctgtcttgaagactggtggtgggccaccgatcaccaagccgttctcgattcgaatcgcgaatccgatagtgaacccgacgtattccgtataacccgcgaatggctgaccgcctatttcgccggcgaacgccccggctcggatcaggtgccgcctttgcatcccgccggcacgccattccaacatgaagtgtggaatctggtggccgaaatcccctatggcatgacggtaagttacggcgaactcgccgccgaattggccgaacgacgcggcggcggccgcatggccgcgcaggcggtcggaggcgcagtgaagcgcaatccggttaccatcatcgtgccctgccaccgcgtagtcggctcgggccgcgcgtttggcggctacggcggccgactcgacatcaaggccgagttgcttgaactcgagggcgtggatctggcgcgcttcgatctgccgaacctttgacgggcccagcggtccgcctcgtcaaaaaggattgagtggttaaccctcccgccggcgggagatggcgcgtagcgccggagggtggtcggctggctggcatcgcaaccctgctacccgacaattttcgacaagccgacgggaatccttccacgaattgttcgccgtcggtgcagtcttgctcgatcgcgccggccaaaaccgtacaatccctacaatggaatgcatatggttaattgctgcgcgcagccgcacggccgcacgcgatcgcaagaccacgcagcccaaggggatatgcaatatcaacggaagcaggaggtgcgcatgaccggcattatcgattacgcgcacaccgaaacgcgctccttcgccgacttgccgttcaacgaaatcgacgccttgatcatctccacgctcatctatgaggatgtggccagtgtctgtccgacgttgatgctggatgagacgcggtcaggctcgttcgccgcacgcattcgcgctttcgaacccaagcatccactgatctggctgaagggtatctggcatcccgagcttgaatcggtaagccttgacgaggccaaccgcgagctgcatcgttcgccggaaacacatgccgacgacaagccgcacgaagcccaaatggtttcagtggtcaacccggacctgacccacgacctgttccaggccgcaggcgaaaacccccgctacgccaacgttcgcctgggcgcggtggtcgagcacatcaatcagggtgagcaaacccaattcgccgccgccaccttccaactgcccgacggccacaagcgccgaaagccgacctacaaaggcacgttggttatttccttccgcggcaccgatgattcgctcatcggatggaaggaagatttcaatatggctttccagtatccggtgccggcgcaacgttcagccagcgcctatctggatatggtggcgcgactgtgggagggtccgattattctggtcggccattccaagggaggcaatctggcgatttacgcggccatgaacgccgatcccaaggtgcgcaagcgcattcagcatgtctattcactggatggccccggtttcccgccggagattgtgaccagccccgcctaccgcaccatccagccgaaggtgacgaaaatcgtgccgagttcgtcgattgtgggcatgattttcgagaccccggagccttgccgcgtggtctcttccgattcggatggcatcatgcagcattccgccttcacctggctattggatggtgaccagttcatcaccgagccggatttgagttccagctcgcagttgtttaacgaggagctgaaccattggatcgccacgcttacgcccgaacagcgcgagcgtgcggtggatgcgctgttcaccgtgctgcacgccaacggcgccaccagcttcagcgaggtgatgagcaacttccccgcttcgattccggcgatgcttggcgcgtacgttgggctgacccccgcagaccggcgtcatttggttgaggccctggcgatactgttcaaggcgtccacggccaaacgcaagccgacgcccgccccggcttccgcaccaagttctgcgacctccaaagcaacagccgagatcccagcagaaactgcagcaggagcagatagcgcagctccggccagagccgatactgatgccgatgccggcaccacagcttcgccatcagcggaggacgcaactgaaatcgccgattagctcatagacatgtccacaaataatagttatactgcccaataagttattagacagcgtgaccatatcacgctggtgcatcaggaggaagagatgccacgtccacgccatgattccgaggtgctgcccgccaaagaacgcctcgagaacgctttctgggaattgctcgccgaccgcgactatcgcaagatcaccgttaccgacgtggtgcgtgaggctggcgtgaaccgtaattcgttctactatcacttctccagcctgcccgaattggccgattcagccatcctgcatcaggtcgaatcgattccgatcaaccgcacccccgatccgaacggcaatcccgaggaacaatggcgagaccgcgtcaccgccacgctctccgatccagagcagcgtcagcgcctcgaccacctggccctgttggcaggcccgcacagcacgcttgaactgaccgaatcgctgcgcgacttctgccgtctgcaaatgctcagcacattgcaacgcgaccccaagaaccttgacctgaaaaccgatctcatggtcgagttcaccgtgggcggcatgctcgccgtgctgcaacgttggcccgaattgagcgacaccatcgaaatcaaagacctgcttaaagaagatgtggccgtgctggccatgggcatatacctggccatgagccaaaaggacatgcttaattactggaatcgcatcttcgtgcacaatgcgcaggattcgaccgcccccggcatgccggtcgccgccacgcatgccgcgccatccaccatctcatcgtcgaacggccccgcaggattccccgggtacaccgcttgaccgaaaaccagcgagtctggattgtttccgccgcacgaacctcgcgtgaggtttctcacaaggcgcaatcagcctctcatgctggcgtttccaacccacgcacaggaagatggaagcatgagcgaaacatcgaacaagacccgtctggaacatgactgcatcggccagatggaggtgccggcgaacgtctactggggtattcacacccagcgcgctatcggcaacttcccggtctccggcatcaccgatagccaacatcccgagctgattcgcgcctatgccacggtcaagcgcgcctgcgccatcgccaatgaggaattaggcctgatcgacccagccaaggccgaggccattcgcgccgcctgcctagaaattgaggccggcaaactggccgatcagttcccggtcgatgtgatgcagggcggtgccggcacctcgtcgaacatgaacatgaacgaggtgatcgccaaccgtgcgttggaaatcgccggccgccagcgcggcgattacacatacatccatccgaacgacgacgtcaacaagtcgcagtccacgaacgacacctacccggccgcctgcaaactcgcgcttatcgacgcgatcgggccgctcgccgagtccaccaagaaactcgccaaggccttccacgatctggccgacaaacatatcaatgacgtgacgattggccgcacgcagctgcaggacgccgtaccaatgacctatggtcaggaatttcatgcgtttgccacgctgttgaagtctgatttggctgcattcgatcgcgtggtgccgctgctggcccagctcaacctcggtgccaccgccatcggtaccggcatttgcgcggatctgcgattccgcaagtccgctatcaagcatctggcgcaaatcaccgggctgccggtcaccgccgcgcccgatccggtggccgccatgacggatatgggcgcgtacgtggccacgtcggctgccatcaagagcctcgccgtgcacctgaagaaggccgccgacgatttgcgactgctcaattccgggccgcgctgcggtttcaacgatctcaacgtgccggctcgccaggccggatcgtcgatcatgccggccaaagtgaaccctgtgatccccgaatgcgtcaaccagtgctgcttcacgattttcggcatggacgtgactgtgaactgggctgtggccgagggacagttgcagctgaacgccttcgacccggtgatggtgcatgagctgctgaccggcatggcgttgctgacgcacgccatggagacgttccgcgtcaactgcgtggaaggcatcgaaatcaatgctgacctggggcgttcatacgctcagtcctcaccgtcgatttccgccgcgctcaaccactacatcggctacgagcacgcggccgacatcgccgccgaagccgtacataccggccgtaccgtgcgcgaggtggccggcgaacgcaccgacctgcccgccgagcagttggacgagattctcgatccgattcgactggcccgaggcctcggccagacctgccgcgagcaccaggagtagcggaatcgaccgtagaccgattccgctttctgccaccccgtctccacgacttcaccagaaacgaccgatacagtaggcgtatgactgaatatgcagaagacatcgcacgctggtttcaggtgaacgccggcaaactcatctggctgaccattgtattggccatcgtatttgtggccgaccgcgtcatcagccgcgtgttgcgcaagattctggacaattctcagattcccagcgcctcgattttcgtgaacctcacgcgcgtgaccatctgggtcaccggcgcagcgatggtactgcagcccgtattcggcatcaatccgaccacacttatcaccgcccttggtgttggaggtgtggcgatctcgctgggtctgaaggatacaatcgccaacatcatcggcggcttcggcctgatgctgggccgcgtaatccaacccggcgatctggtgaccattcaaggcgtcacaggcaccgtgcacgacatcacctggcgtcagaccgtggtgcgcacccgttccggagacatgatggtcatccccaattcggtactcaatacggccgccctgaccaagctcacgccggtcagcgaaggcatggccacgcttgagttcacggccaagacctccggcgacccgtctgcgatcagtcaggatattctcgaccgcgtaaccaaagccaccgccgacgtggcgctggagggtcagccgccattggtcaagttcaccggcttctccccttacggcatgaccggccaagtgcttgtgttcgcgcgcgagggtgtgctgccttccaccatcaaagatatggcggcgcgagccatcgccggttcgggcaccgaataccttgttgaagatggcggctcgtcaggcaatctgtgatatctcccggctcgcctctctgggtccggctatgacagtcatgcgaacagcatccaaccggtaagcatcacagtcaacagtaggtacgcgataacgccgggattggcataggcggtgcgtattttaagccccgcaggcaactcctctggcgcaagatagaactcccagctcttgcacttggtgataagcagcacgataccggcaatgcagaggcccaacatcactgtgccgtacaacatcatgatgcccatgccgcccatgttgccggtttcagccatacgcatgatttcggcctcgctgaccgtgccgtcgaggatgcggggatcgatctgttgtatcaccaatggggcgagtactgacccgttcaggttgatcagcatgtgcatagccaccgaataccgcagtcgggaggtgcgtgtgtatacatatccgaacatcagtcctaggccaaaggcgtagaagaactggaacacgttcatatggaatagcgcgaatgccaatgcggagaacatgattgcggtcttctctccgtaccggcgcaggcgggagataatctccttgcgaaaaatccattcttcgcaaaccggtgccaacaggcctatgaacaatgcgttcatccgccagtcgctgccaagaatcacgtcgttgatgcgattggtggcctgaccatcagtggctccggcagacaatatattgccaatcatattgcccaagaacattaccggaatgcacatgacgaaaatctgaatgaactcccccgccttcatggggtactgccgggtgcgaataaccggtacgcgagtgaaggccaacatactcagcggcatggccaccacatacagcggtccggaggaggcgagcagcacagcccaagcgggcacatcggtgccaagcagcgttcgtagcgcttcagtggccagaatattcagtccgatccagaacaccatcataatggcgagcgccgagccgattgtcgaaaaccggcgatgggccgtgaaccaccaatcgcgtggggtttgttgcggctgctgtggttgctgaggttgctgcgccggcggcattggttcgctcatacttatcccccatagttactggccgcaaacggaccgatcacacgtgcaatactcttcaagaatacggcacggcgtttcgattgcattgggaatgggggaggaaatcatcaatgggcaaggaatgatcaacgtcaatcattcccaatgccgagaaagtcccctactctgcaagattgctgtgggacggcacgcgataatcgcccaaaaatcgccgccgtcccacacacatcattgccgataagccattcgacgatcgtacagtcacaaaaacagaacagaaccgcacgatcatcgcaacgccattcagcaggcgagcgcggcgaccggacgcggggtgacaatcacgtcatcgcccaccgccagaccggccagcagctcgctggcgggcagctgcacggtggccttgagctgttcgcccttgttccagcgctggtattcgccggaggtgatgaccgtatccacgcgcaccaaggagccaaggaagtgaacgacttccacgcgggcgcgttcgccgacgtgcgaatcgctgctgccggccaaggccagcgtcaggttctccgggcgcacgagcacggccacggaatcgcccttggcggagccggcgagcagcggcacgcgctggccgaagaccacggcctcgtcgccattggatgcgccgggcaggcggttggtgagtccaatgaacgtggccacgtactcggtggcggggcgctggtacaggttctgcggggcggcgatctgctcgatcttgcctttgttcatcacaccgatgcggtcggccacggccagcgcctcttcctgatcgtgggtcacgaagacggtggtggtgccggtggtgagttggatgcggcgaatctggtcgcgcagctggacgcgcaccttggcgtcgagggcggagagcggctcgtcgagcagtagcacgcgcggcttgacggccagcgcgcgggccagggccacgcgctgttgctggccgccggacatctgctgcgtgtacttcttggcctgatcggcaagtcccacgagctccagctgttccatggcgatcttgcggcgttctgccttgcccatgccgcgcacttcgaggccgaattccacgttctccagggcggtcatgtgcgggaaaagcgagtaggcctggaacaccatggccatctcgcgcttgttgaccggcacgccggtgacgtcttggccgccgaccatgatgcggccgccctggatgtcttcgaggccggcgagcgagcgcagcgcggtggacttgccgcagccggagccgccgagcagcacgaccatttcgccgggcttgatgtccaggttgaagtcgtcgagcgcgtgcacggtggagccggggtagatcttgacgacgtcacgcatctggatggagccgccgccgcgcttggcgctgtctttgagcagggccttggcggccttggtcacgtccttgccgcgcacgccttcgagggtggcggtggggtcgttcttgaaggcgtcctcggcggcagcggacgtgggggcgggtgccgaaacagaagccgcggcatcggcaccggcatggcgacgggtgaaaatcgaattgctgttcatcaggttacttaccttcccttgacttgcgcattgcgtcggagatcaggtcgagcgcaacgaggagcaccacgccgaagagcagagccagcagcgacatggcggtggagatttgagaattggactggccgagctggtagagcgcgacctgcaggttcatacggccgagcagcgaggcgacggtgtattcgcccagcaccacggcgatggagataaaggatgccgagagaatcgactgccataggttcgggatgatcaccttgaagaacaccttgggccaggaggcaccgagcgagcgggatgcctcgaccagcgtcttgacgtcgatggagttaagccccacggcgatcgcgcggaaggcgaacggcatcacgagaatcacgtaggcaaagcacagccagattgggttggtgctcagcacgtcggcggacagccagcggtagatcgggcccaaacccaccaccagcacgatggccgggatggtcagcggcagcgtggccacccattcgatcgcgcgctccaaaaccttggagcgaatatgcacgatgaccatggtgggcaccagcagcaccagcatgatcaccacggtgaccgcgctcagggccagcgaggtgccgatgccctgccacagcacggtcaggtcggcacccagcgactcgccgttgccggtgaaaatcgcgatccacggcgcggccgaccagcggccggacagcgggtgacgcagggtgaagatgagcatggccagcagcggcacgaacaggaacgccagggtgacgaacaggatcacgaatttgatgatgctctgtttacgcgcacgagcggcgcgcagctgcggcggcttggttgcggaagtttcggtcattgccaacgtccggccctcttttccacggcgtggctcaacagcatgacgatggccacgacgatgatcattgcgaatgccagcacctgggcaaagccctgctggttggggtccagttcgttgcgcatggcaccttggatcataagcggtaccagaatcgaacgctgggagaacagggccgcggcggtcgcgtatgcggagaacgcggaggcgaacagcagcaggaacgcggagatgaagcggggtgccagaatcgggcaggccacgcgcgtccagtactggaacgtgttgccaccgagggattcgcatgcctcgcgccactgtggacggatcgaatcgaccgcgggcaggaagatgatgatcatcagcggaatctggaagtagcagtagatggtcaccaggcccggcaacgaactgagccagttcgggttcacggtgtagccggtcagtgtcttgataagcatggtgccgataccgttgatgccgatggtggcgatgaacgcgaacgcgagcatcacgccgccgaactgagcaagcgcggaggagatggcggagaccatacgacgcagcaggccgttcggcttggcaccaatgaccagtgcgtaggaagcgagcgcgcccaccactgcgccgatcagagaggatgctaaagacaccagaatcgaggtgccgaatgcggcgatggtgttggcctcgaacatcttattgaagttcgcgagcgtgaagttgccgctgcgatcctggaatgcaccgacaatcacgatgacggtgggtgcgagcaggaagcaggcggtgtaggcgaagaacgggagcgtggtggcgagcgtgcccagctcctggcggtgcttggccatcgccgaggagagaggagaagcgggagtagcggacggacccgcagccttggcggcagcaggtccgttcgatgcaatgggtgcgattgcggcggtcatcggtctgtgcctcagttgccgatcgtcttgtcccagttgttctggagccactcggtgatgcgggtggagtcgtcgttggtgtaggagaccggctcgccttcgatggtgatggcgtccttcagagtggcctggtcgacggtgccgtcttccttcatggaatcgagcagcaccgggttggcgccgcccttgaaccacaggttctgggcgtcggcggtgtacaggtactcctcccacaggcgggcggcggccgggtgcggcgcgtccttgttgatggcctggttgtagtagctgacgacctgggccttcgggaaggtcttgtacttccagttcacgcccttgtccttgagctccttcttgtaggaggcctggttgtaggtccagtcgaagaccacgccggtctggccggagtcgatggtgccgttggtcacgtcgacggtggtcaggttgccggcttccttgagcttcttgaagtagtcaaggccgggctgcaggttgttgatgtcgccaccggcgagctggttggccatcaggtagccgttgaaggcggcgccagcctcggcgggcttgccgttgagggccacggtgccggcgaacttcgggtcgagcaggtcgtccagggagctgatgtcgccgtacttgtcggcgttccagcccacggacatgatgccggtgtagtcggcgtagtaggcgccgtcggcgtccttggcggtgtccgggatcttgtcccaggcctgcaccttgtacggggcgaagtagtcggtggaggtggcggcgatggcctggccgacatcgaagacgtcgggggcggcgtcggtgcccttgttggtcttggcggcgtcgagctcttccttggatgaggcgttcgggttgagctcggtgaccttgatctccgggtacttcttcttgaagctctcgatgacctcgccgtagttggaccagtcgtgcggaagggcgatgacgttcagcgcgccctcttccttggcggccttctcgaggtcttccatggtgccgaagtcggcgagggaggtggctttggcggacttttcgttcacggtgacggccttgccggtgctttcgccggtgccatcggaggaggcgttgctcgagccgcaggcggccatcgagaacgcgagcacggcggcgagggagccggccgcgatcttacgcaggttgttcataatgttccttttctcaacatcatccagacgacagtctggggagtcgggcttggtatgcgcggcattcgcgcggcccgtgaatccaagaaaagaaactatgcgcctaatctgtcctgacactggcgcgcaagtgaattgcgttcgccatttgctgtacgcctgttgaacttaggaaaacttggcatgaattactgacaggtatgggcgatgtgtcaatagcggaaccggcctgcggccgattccgcaccacacttacctcagcacgccctcaatcaatcgcgtgatgagttcggtgtagctcactccggtggcatcccaagccttgggatacatggaaatcggcgtgaagccgggcatggtgttgatttcgttgaccatcaccgtgccatcaggcgtcacgaaggtgtccacacggctcaagccggcaccatccacggccttgaacgcgcgacgggccacgtcacgcacgtcctcaagcacgctgaccggcagattggcaggcacttccacgtggctggcggaggcatccatgtacttggagtcgaaatcgtagaactggtcgtcgttctgatgatcgagcacgatttcgccgggccagctggcctcgggctcgtcaccggccttcgggcacagcacggcacattcgatttcgcgaccatcaatcccctgttcgacgagcaccttccagtcgtgctcgccggcggtggcgatggcggcggccagacgatcctgctgggtctcgcggtcatcggctttctcgaccttggtcacaccgaagctggagcctgcgcgcgaaggcttgacaaacagcggataagtaagaccggcgtcctcgatctcggcaagcacatcggcggcggtgaagttgcgcgcatcgaccgtcacaccgggcgcggtgggaatgccggcggcatccagtaccaccttggtgtaatgcttatccatgcaggcggcggaagcaaacactccgcaccccacgtacggcacacccatcatttccagcaggccttgaaccgtaccatcctcgccataggggccgtgcagcaccggcagtaccgcgtccacatggccaagggaggtcagcacatggtgcatttccgggtcggacatgctgacgaagctggtgccgaagccggaatcggcggaattgatgtggctgggctcgccgatgaagaaaccgtcctgtccgcgagaggggtcaagcatcaccgggcgcgattccggggtgatctttacggtcggcagctcgccgccgtccaagttccagccacgcggatcttcgccattgatgatccacttgccgtccttggtgatgccgaccggaatcggctcgaaccgttcagtgtccatggcccccagcacaccggcagtggagatgcaggaaatcgaatgctcgtctgcacgcccaccatagagcaccacaacacgcttcttggccataaccatccttttgttgaaactacaaccgttttcaagcctatgctttgcaccgccaaccggaccgaaccgcgctcggaacgccgcgcacaagagacgcacaccagtctactcgtgcacgtcaacgacgtatacgccacgcgactttgcacgtacaacgtatacgccacgtatacgtcgcttctctcgttattcgccggtaacctcgtgaccgaacagtccggcaagcatctccgagcaggaaatgccttcgttcagcacgcggctcatctgatacgccaacggggtcggcacatcaagctgatcgccaagagccaccaccgcatccgtggtgggcacgccttcggccacaccgttgctgaccttggtggcctcttcgaccgtcaatcccttgccgagattcgcgccgaacgtatagttacgagacagcgaagagccacaggtggcgatgagatcgcccacaccggccaagccgaagaaggtcttgggatcggcgccagcggctacgcccagcgcggtcagttcggccagtccacgagtttcgatcatggctgcggtgttctcaccgtagccggcaccacgggccatgcccacggccagcgcggtcacgttcttcaggctgccgcacatttccaggccgatgacgtcggtggtcacgaacggcttgaaataggaggtggtgcatgcctcggccaccttcgtggcattatcgaggttcgtgcaagccaccacggtggcggcgggatgacgatcggcgatttccttggacaggttcggtccggaaatggcggcgaaccggtcggccggcaagtcaagggattcgcggacgacttcgtccatacgcttgttggtgccacgctcgatgcccttcatcaggctgacgacgatggcgtgatcgggaatcagtcccttgaattcgacgagtgccactcgcgcgaactgcgcggcgatggccacgactacgatgtccgcgttcttgacggcttcggcgcgatccccagtggcggtcatgttgtccggcaacttttcgacggacggcaggcgcacggcgttgtggtggtgatcgcgaatgccctcgacaatctgctgctccttggcccacatggtcaccgtgttgcctgcgtccgccagcacttggccgaaagcagtaccccatgctcctgcaccgagaaccgttatatttttacccatatcaaattcctaccttcgcttgtcgcgcaacttcatcggcacaatcttgtgccatgctactcgcctaggctccccgtacgggaaccggtgcggctacttctcagccgggaacgggccgccggcttcaggccaaggcttacgactcatactgcggtagtcccagtagccttcagcggggaactgctcgccacgaatttcctccagtactgtgttcatgcgtttgagcacgcgccacatcagctcgttcacggcctcggcaggcggctcttcaccccatgagtccatgtcggcaagcagatcggagtaatcgagcgcatggtcatagcacatcaccacgtttttgcgcggccatggccaccagtggttgatggaggcggcaccccacgtcaccgccgggtacagcggcacctgatgccccagtctgcgcgaggattcaagggcgatatatcccacgccctccttaatgctcatcacccactttttcgggtcgcgggtcacggtgccttccggccagaccgtcagcgggcggccggacgtcagaatatcaatcgaggtctcttcgatctgcttggccttgcccgaatgacgctgcaccggctgcatgccgaccaactggaaccacttgccgatcaatggccacttcgccatctcggccttggccatgtaacgggggcggcggcccatgtggaacaggctcatcattggcacgaacacatcaaacatggtgacatgactggcggcggtgatgaacggtccggtttccggcacctgttccaagcccccggccttggtcttgcagctggcgcggaacacaatggacacccctcccagcagtcgtttggtggccttgggattctgggcgttgatttccggctgattgggcgtgcgggggccggtcgggtaatactgtgtcgagtccacaagcgtgtggcgggcggccagacgcttgacctgctcatcactcagcgggcttacggccgaacgcggcgacggttttcctttggatgccatggtctctattgtggcacggaccaccgcccaacgattccagcgcaacattcccgggaatgcgtcgcacaatacgcggcggcccgtctgcacacaccatgcgcgcagacgggccgccgggaaaacgttcgaatcactccaccgcgatggcgtcgatctccacgagcgcgcccttgggaatcatgttgttgccaaaggccacgcgggcgggcttgacggagccgatgaacgcctcagcgtaacgtgcgtccacttccttgaagtcctcgacgttcttcaggtagatggtggcgcggcacacatgctcaatgccggtaccggcagtgtcgagaatgtgcttaatattcttcagcgcctgtgcagcctgctctccagcggtctcgcccgccagttcgccggtggccggatcaatgcccagctggccggatacgaacacgaagccattggccttcaccgcctgactgtatgcgcccagcgcggccggcgcctcggaagtggctacggcttccatcttttcgctcatattgtgctccttctcatcttgggggcgcccacctgctgcggccggcgccggtacacatcaccaccggctacgaccaatcgcacgatcagcaacgattggcaatgccgattacgtagcagtctactgagcaaagtcgcgtttagcgcgcatgatgctcggcatacggccatcaacagactattccttgctattccagacgattccagacgattccagacgattcggctaccgttctcgccaaaccggacggtttttccacgacccaagcgagccggcatcaccggccttgccattgccgacaccagcaccagccttgcacgcgccgaatatgcaaaaggcttccggcggttagccgaaagccatgctggtgggcttgatggggatcgaacccacgaccttctgttccggagacagacgctctatccactgagctacaaacccgagcaacttctttactgtacaccacatcacgttgcatgcggcacatacgtcgccaaaataacgagaaaatcgccattatcggctctacaatggggttatgtcggaacctacagatgacttcgaatacgaacgccgcttcttctgtcgcgaactgccggcggaatacgacgacggcgacgccccgaccctcatcattcagagctactacgtgcatgccgacaattacgccttgcgcgtgcggctggtctcgcgcaaggttcacgtcgacatgacgcccgacgtaaatccggtggccgtgctggacgaataccgcgaccggttctcggaagcatatgtcaccgtcaaaggtccgtccgtgggcggcacgcgctacgaagtcgagcgcgaaatcgatacgcgtatcgcggccgaactcatcaagcgcggcggctcggtaatcatcaagaaccggtattccgtgtggattgaggaagacggctggagcgtggatgtgttcggcgggccgaatgcgccgctcatcgtagccgaggccgaacgatccgggccggttaccaatctgacgattccgaaattctgcatcaccgaaatcaccgatcaggcgcgattcaataacgatggtctcgccaaccgtccgttctgtaagtgggcggatgatttcaaggaggagctggcgctggaggggccaaggttccagcagtatttcgggaagaatcggatggtttagggggggagcaatcgagtacgctcgtgagctcccctcagtcatctacgacgacagcccctctcaaagaggggagccaaaaccacttagtacatgagggtggctaggcgacgacgggcgcgggtcagacgcgggtcggtgggttcggggatggcgaagtattcgagcagacgcttgcgaacctgctcgatatcggccttgtgcccggcggccaaaaagtccagcaaacggtcgaaagcgtcttgaatctggccaccaatcatgtcgatatcagccacggccaactgcgcttccacatcgtccggcgctgcggcggcagcggcacgtacgtcacgtacatcagcggccccggagcgggccagcaacagcgccttcgcacgttcgcgggcggccagtgcatcggacgggtcggatccgagcacgcgctcgtattcggcggcggcaccggcgtaatcgccctcctcggccaaacgatgggcttcggcatgctccggcggcacctgctcagcacccgcgacggcaccggtggcaccagcgctcttggcggcatcggaatcaggatcacccgagtacggcgcggtaccgttcacaccagactgcgcggcggcctcaataatcttcggaatcacctcgtcagtaagttgcttgagctcgtcgtcacccggaaggccctgcaacagcggcatcggacggccggcaatcaacgcgaacagtgcgggcacgccctgcacctgcagcgcttgggcaatcgagggattggacgagatatcgatacgggagagctgaatctggccgttcagggcgttcaccgcgtcgcccagtgcacgggccatcgggaacaggcggtcatcggtcggcacccacagaagcagcaggatcgggaaggtcgcagaagtctgcaccattgcctggaaggtgttttcggtggtgtcgatcacgtacccaccagcggcaggcgcgccgcccgcttgtccgggctcggccttgacctgatgcttcagcgcctccaaatcgacggcgcccgccaatgagactcccggattgaactgctgctctgccataatgcctcccgattccacgcgattcgcgtacaacaacaatcacatttgctgacattgattgtaatgccgattcccaccacgtagggattcttccactacgcggtggaattcccaccacgtagcaaaacgcccaccacgatgtgaccccaaacggcaccattatgcgaaaggtaaagttttatcgacatcgtggtggacgaatcacatcgtggtgggggcgttaaccgcgcggtgggtggcggcaacaattacagcgcttcgacctttaccggctgacggtcggcgcccactgcggtgatttgctcaccggaacttgccaacggaatgtacaaggccaccacgttcacatacgtgaccttcatggtgctggtgtacttgtcgctattgaacagcgccttctcgtcgtcggaagccggccgcgattcgcggccatcccctgccttgcgagtccattcgccgttaatacggccaaccaccagatcaccggcaccgtctgcagcacgcatcacccacatctgttcaggcacagcggtgaatttttgctcctgcgtaccgttgttgcgttgcataccttcctgcaccttggccgtggtattggccagttcctggcgcagcaaatcgtctgcgaacttggaagcgtattggctcttggagccgttctgcagcacatcggcgtattgggccaaggcatcggcgggagcggccaccagcttctcatcctttgcggtgcccatctgcgagccaatagtcggaatctcgaacttcggcagcttggcgccctcaaacagtcgagccatagccatcagcttgtaattctgctgggcggattcctgatcgaagaccagcaaacgcttggactgctgatcttcggtggtggtcgtgatggtgaacaccgagcgaggccatccgtcgtccgtaggaatcaccgtctgggcgatgtccttgggaatggtcgcatattcggacataccgccgccacgctgattgatcgtggtctggctgatgcgaatgtccagctggggcccgcccataacggtcgcatacccatcgggattcttggcctgatcggcttcatcgatcgtcttgagaatcttcagacgaatcttcttctcctgcgcctcggtcaaatccggcgcaaccttggtggaggtatcagcagccggcgtcggcagttggccttcacaggcggtcaacggcacgaccaacgccatgcaggcgagggcggacacacacagtttgttccatcgcttgttcatcagctttcctcctgtccgtcatcggccgagtcgtctccggtattgacctcttgggccaagcgggagaagtaggcctgcagttcgtcaggggtgattaccgaagtcgattcgttatcgccggcgctgaggccgggctcagcgccgctttcggcaccgatctgctggtcggcgaccaggttacgcgaacttgggtcgatgataaccggtgtttcggtggcttcagattgcgaggattgcgaggacgcacggcccgaacgccgatgtgtggcgtgacggcgacgattacgtcgacttgcaccatccggcttcccggacactgcgatgctggcgggtgcctcttcctcgattacggcgcttgccatgccttccaccatgcgcttgcggcgcttatgcggcggcatggcgaacacggaggcgcacagtacggccagcacggccagcaatccgccggacagatagaacggcatcgcaaagtccggcacttcggagcgcacccagtgcagctgcaccttggcgttggtgacattttcgcccaaatccacaatggctaccgtcgaggcgccggtcttcttgctcttcagcgaaacggacccagtgccgcatttcacggcagtccacatatcggaatccttgaacgacaccgcgtcatcggcactggtaggcgctccctgactcgtgctgcttcccttctgggtgctcagctcgctccatgatgccaatccggtgatgcgggtataggacttctcggacgcgacccatccggcaacatccttggacgaacccaacgccacgcacgcctcgtcctgagaggatcccgagtccacggttatcgtggcattctgatccaacaaggtcagcacattcggatcagtgacgacataccgggagccgctcatggttgcggaagcggtgatttcagtggagggcttccacatcgtggcattcatgtaccccaacaccacagccgccacggccaatagtccgaagataggcgtcaccactccacgcatgattttggcatgacgggatggacgcttggcgcccttatccggtcttgtagtctgttcttcagcactcataactcaaccattctacaatcttcacctgtttattacctaggagcgcagaaaatcaaggtttaccagtagggtgatgtgtcatgcgtaagtctgttaagtctatgttatctcccctcggcaaggccgttgcccttgcctgctcgctggcgatgtgcgtgtcgctggctgcctgctccagttcgagctcggactcgaaatcctcttcttccgattcctcttcatcttccgactcttctgacaagaagggccaaattgccggcgtgaccgccaagggcaagctcggcgagaagccgaccatctcctttaatacgccgatgaccgtgtccgacggctcttatgtggtgctgcagaagggcgatggcgacgtgatcgaggagggcgaccgcgtctgcgcccaaggcatcgcgctcaacgttaaagacggaaccgagctcatggacacctggaccaagaacacgccggattgctcgctgaaggtggattccaagaccctctcctcgacctactacaaccagatcaagggtgccaagatcaacaccacgattggctttggcgtcaacgctcaggattcgtccgggtactcttacattctggcgatgacgtttgtgtccaagtccaaggacttggagaaggccactggcgaggaagtcaaggatgtgccggccaatctgccgaaggtgacgcgagccaaaaacggcgagccgtccatcgacatgaacggtcagggttcggttgattcgctgatctcgcagacgctgatcaagggtaacggcgccaagctgaccgacaagaacaccgtggtggtcaagtacaccggttggcttacggatggcaagcagttcgattcgtcctgggatcgcgattccacaatcgacgccgatctgttcagcgattccagcggccagcatcaggttatcgagggctggcagaagggtctggtcggccagaccgtcggctctcaggttctgctggtgattccgccggatcaggcctatggagataaggagcaaggtccgattcccgccaactccacgttggtcttcgtaatcgatattctcgccgcgtactaaaagatatagcaggggctccctctgatgagggagcccctgctatatctagaacagcctgagactgtcgtcctcggtgcctttcatatcgtcgtaatcgaggatgaggcaggtgaagccgcggtctttggccaagacctgggcttgcggcgtgatggtttgtgcggcgaagatgccgtgcaccggggccagcagcggatctcgattgagcagttcgcagtagcgagtcagctgctcgacgccatcaatgccgccgtgacgtttgatttccacagccacatgctcgccctcggcattcacggccataatatccactgggccaatggcggtcgggtattcgcgacgcaccagcttggctcccttgccgatacgctcgatttgctcggccagatagcgctgcagatggtcttccacgccatccttgatgagacccggatcttcgcccagatcataggtttggtcggaatagatatgctgcagcgtcacttcaagaatgtccgaacccttgtcggcgctgacacgtagcaccttttccggctcaccagcggcgacactttccggggaatgcgtcgcagaatcaccatccacagccccaccagcgacactttcccgggaatgttgcgcggatttggcggctgggtcgatctcacgaatcgtgcagggcgcggtcatccagttcagcggcttgtaggagcctaattcggagaaaatcaacaggctggaatcggccttgatcagcaatacgcgcttggccaggggcagtgaggcgttgaggcggcccgaatactcggccgaacagtcggcaacaataactcgcataggccaccactgtagcgcaacacatggcatacatagcaaaaggggctctctggaaaaccagagagccccttaaggagttggttcaggtcactcggcggtgccggagtactggacgtcgtggccgcgctcgaccgccacggtgagtttgttcgagtcgaaggaaatgaatccgtcggtcacctcgaacatgtggcgatcgccatcgggctcaaccacggtgagcgtaccctgcttgatcaccgtgagcacaggctcatggtcgggcaggatgcccatgccgccctcagaggcgggaatggtcacgctcgtcgcctcgccgtgccacacagggtggtcagcggcgacgatgttgaccttcatcgtggttttttccgcagccatcacgcacccagttccttctgcatgttgtgccacttctcttcgaggtcgtcgatgccgccgatgccggagaacgcctgctccgggacgtcgtcgtacacgccgtcgcagatgcgggtgaaggcttcgatggtctcgtcggccggcacgtaggagccggggcgaccggtgaacttctcagccacatagaagttctggccgaggaactgctcgatcttacgagcacggttcacggtggtcttgtcctcttcgccgagctcgtcgataccgatcagggcgatgatgtcctgcagctccttgttacgctgcagaatcgccttgacgcggttggcgcagtcgtagtgagcctggcccacgtaacgcggatcgaggattcgcgaggtggagctcagcgggtccacagccgggtagatacccttggaggcaatgtcacgagaaagctcggtggttgcatccaagtgggcgaaggtcgtggccggggccgggtcggtgtaatcatcggccggcacgtaaatggcctgcaacgaggtgatcgagtgaccacgggtcgaggtgatgcgctcctggagggaacccatctcatcggccaggttcggctggtaccccacggcggaaggcatacgacccagcagggtggacacctcggaaccggcctgggtgaagcggaagatgttgtcgatgaacagcagcacgtcctggttctgcacgtcacggaagtactctgccatggtcagtgcggtcagcgggacacgcagacgggtacccggctgctcatccatctggccgaagaccagtgcggtcttctcaagcacgccggcctcggccatttcgccgatcagatcgttaccctcacgggtacgctcgccgacgccagcgaacacggacacaccaccgtggttctgggccacgcgctgaatcatttcctgaatcagcacggtcttgcccacacctgcaccaccgaacagaccgatcttgccgccctgcacgtacggggtcagcagatcgatgaccttgatgcccgtttcgaacatctgggtcttggactccagctgatcgaaggccggcgggttgcggtggataggccaacgctcggagacggtgatggtctcatccggcttcttgttgaggatgttaccggacacgtcgaagacgtggcccttggtcacgtcgccgaccggcacggagatcggggcgccggtgtcggagacggaggcaccacgaaccaggccgtcggtgggcttcagagcgacgcaacggaccgtggaatcaccgaggtgctgttcgacctcgagggtgatctcggtctccttcgcctcgccttcttccttggcgctggtgttgacgatcgttactttcagggcgttgtagatgtcgggcagatgacccaccgggaattcaacgtcgataaccgagccctggacgcgggtgacgcgaccgttggtaggctcggccgcagtggtctggttgtcagccatatgcgttcctactcttccttcttggtcagcgcgtcagcgctgccgatgatttcggtaagttcctgggtgatcgaggcctggcgggaagcgttgagcttgcgcgtaaggtcgtcgatcaggtttcgtgcgttgtcggttgccgtgtgcatggcgttctggcggcttgcggtttccgacgcggccgcagtcagcaggcactcgtggatacgggactgaatgtacttcggcagaatcgcatccagtaccttttcgaggctgggctcgaaagtgtacagcggagcgacatccgcagtagccggtgcctcttcatcaggatcgggcaccttggtctcgtttttcacgatttcgaccggcagcatgcgcagcacgcgcaccttctgcaccaccatgttgatgaactcggtgtagacgatgtagagttcggaaactccacccttctcagccggcttcatgtaggcgtccatcaaggtgttggagatcgtttcagcaatttccacgccgggctggtcggtgtcgccttcccacgtcgccgcgatgtcacgattacggtacttgtagtacgtcgaaccgcgacgcccgtacacgaacagctccggctgcttgcctgccgcatcgaggcgggacagcagcgactccgtttcacggataatcgaagaggtgtacgggccggccataccacgatccgaggtgagggcgagaacagccacgcgcgggttcttctcgtccttcaccgcgatcggatgcgtgatatgggtgtgggccaccaacgcttgcacggcatcgaaaatcgcatcggtgtacggcttcgcgttcagggccacatcacgggccttggcgatatgcgaagacgcgatcatctcctgagcgttgaagatcttcgccaacgactcggtggagcggatgcgtgatttcaatgcgagttgcgagcccatggcttacttttctcccgccacgatcttttcctgatcgaccggcgcggccttgtcaacgtccggcttcttctcgaccagcggcttgccggcggaagagacgaacgtcgaacggaactcgtccacggccttatcgagggcagcctcggtgtcggcggtgaattcctcggtctcgcgaatggtcttgaggatatcggtgttgtggtcgatgtagtccagcagtccctgctcgaacggaaggacgtccttcaggtcgaggtcgtcgagcttgccgtgggtgccggtccatacggacacgacttcctgttccggcgagtacgggtggaactgcggctgcttcaacagctcggtcaggtgggcaccacgggtcaactgggccttggaagccgcatccagatcggaggcgaacatggcgaaggattccagcgaacggtactgtgccagggagatcttcagcgtaccggagaccttcttcagagccttggtctgtgcggcgccaccgactcgagagacggagataccgacgtccacggcggggcgctggttggcgttgaacagatcggactgcaggaagatctggccgtcagtgatggagatcacgttggtcgggatgtaggcggacacatcgttcgccttggtctcgacgatcggcagacccgtcatcgaaccgccgcccaggtcatcggagaccttggcgcaacgttcgagcaggcgggagtgcaggtagaacacatcacccgggtaggcttcacgccccggcgggcggcgcagcagcagggaaatcgaacgataggcctctgcctgcttggacaagtcatcgaagacgatgagcacatgcttgccgttgtacatccagtgctggccgatggccgagccggtgtacggggcgatgtacttgaagccagcggaatcggctgccggggaggccacgatggtggtgtactccatggcgccggcgtcttccaggctctgcttcaccgaggcgatggtggagcccttctggccgatggccacgtagatgcagcggacctgcttcttcgggtcgccggattcccagttggccttctggttgatgatggtatcgatcgcgatggcggtcttaccggtctggcggtcgccgatgatgagctggcgctggccgcggccgatcggggtcatcgcgtcgatggccttgaggccggtggacagcggctcgtcgaccgggtggcggtgcatcacgtcgggggcctgggcttcgaggatacgacgaccctcaatgccctggatctcgccgaggccgtcgagcggcttgcccagcgggtccacgacgcggccgagatagccgtcgccgacgggcacggaaagcacttcgccggtgcgtcgcacttcctggccttcctcaattccagcgaaatcgccgaggatcaccacgccgatctcacgggcgtcaaggttgaacgccaggccgagcgtgccgtcttcgaacgtcagcagctcattggccatgcaaccaggcaatcccgtcacgtgtgcaatgccgtcaccggccgtggcgacatagcccacttcctgggtgggggtgtcgctcggcttgtacgacgacacgaagtcgtcgagggccttgcgaatcgaggcgggatcgatggtcagttctgccatgatcactccttctattggttattgttcagtcaagtctttgcttgtgtgtggtgttggacggattggctcggccggtcaggccggagtcgcctccgtctgcaccttgcgatgcaagttctgcagctgtgcgaccacggtgttgtccgtgacttcgtcgcccacctggatgcgcatgccacccagcacggtcgggtcgaccaccgagttgatgtgcacctgacggcccaccttggcggagtagacctcgaccagtcgcttgatctgctccttcttcagcggggtggcggtggtcacggtgaccatcgactcgcccatgtggcgggagaacttgttgatcagccactggatggtctccaagtagcggcggcggcgcaggttgcaagtggcgtgttcggcgagcctcatggtgaccttgttcagggtcttgccagagaacacctcgcggaacagcttcacacgggcctcgctggtggcctggtagtcgtacagcttggcgcgtacgaccggcaggttcagcagtgcggaatgcagctcggacagctcgatggatacctgcagcgtggcgtcagtggcgtccgcgtagtacatcatggcgtccacgccgaagtcttccactgcgttggcgatgtcgcgcgcacggctccaacggcgggagaccaagtcagtcatgatctccatggtcatcggatgcgcgttgtcaccgagcagttccttcaggacggccaccttgtcggcaaccgggcgggacgggtcggtcagtgcgcgctccagctgaatgctgtcatcgagcaccttggtgatcgtgaacagttcgttgccgatccgccacgcgtcctcacgggtgtcgcgcagtttcggggccagcgaatcacgcgactcgcggtctgcaatacgtgatgcctctcctcgcatggtcacctccctttctggttacggatggtcacggtcacttcttggcgcccaggtcgtcgatcatcgaatcgatcatcgaggactgcacgtcgttgtcttccagcttggcaccgaggatcttgccggccagggcggtggcaagtgcgccgacctcgcccttgagcgagacgatggcctgctggtgctgggattcgatcgagcgctgtgcggatgcggtgatctgggccgcatcggactcggcgcgggaacgagcgtcggcgatgatgtgggacgcttccgcacgggcgtcgtcgcgaatcttggcggcgtccacacgggcggtgctcagctgggcctcatacttggccttggcctcgtcggcgtccttcctagcctgctccgccttggcgatgttgccctgaatcttggcggcgcgctcgtcgaagatcgcattgaacttcggcatgaagaacttgtagaagaacaccgcaacgatgacaagaatgatcagcgaccatacgatgtcataaacctcaggaatgaacaggtcaatcccgcttgctgcttgtgtcatcaagccctcctttcagtgatggacataatcggttttcgtctgttgatctgcgcagatcagatgatcagggcggcgacgaagccgatcagtgccagcacctcgaccagagccaggccgatgaacatgatggtctggatcttgccggacatctcaggctgacgagcggtggattccatggccttgccgaagaggatgcccagaccaatgccagggccaagagtaccgataccgtaaccgatgacggacaggttgccggcgacctctgcgagggtgatgatatccattgtgtttcctttctaacgtacttggcgacgttataaatcttggggtttggtcggtctgcgattttcccagaccggggaccggaagcggcgggttagtcgcccgtcactcttccgggaagctcaggttgatgtacacggtggaaagaatcgcgaagacgtaggcttgcaggaaggcgacgaacgcctcgaagcaggtcatggcgaaaccaccggcgaaccacagcgcacccaccgggatgccctgcagcttgttgaccgcgtcaaccatccagaactgtgcgaacgccaggcaggtggcgaccataaggtggccggaaaccatgttggcgaacagacggatggtcagggaggccgggcggatgatcaacagctcaagcaggttgatcggagccagcaggaaatagaccggccacggcacaccgggggtgaacagctcgtggcgcagatagtggccgaggccctgcgagcggatggcggcgatccagtactggatcagtgtccagacagcgaacacgagcggcatgaccaccgtggcgttggccgccatgttcatacctggaatgatgccgcacaggttgaaaatgaagatcgtgaagaacagggtggtgatcatcggcacgtagcgcttgccacgggcctcacccatcacgtcatacacgaccttgtcgcgcacgaagtcgagaccgtactcgactacgccctgccaacggccggggatgagcttggcgcgctttgcggtcacgccgagcaccaccaacagcacgatggttgccacgatacgaatcaaaataatgcggttgatggcaaacggagttccctggaacagaatctccgggggaaggaagtcatcaaccgagggcagatgagcgcctgcctcgtcagccaacagcaatcctgcgctgagcgaaccgaccatatcacgcctcctgcttcttcaatgtcaggtgtcagtttaaacccaccgggcaggcaaatgtgacgtgctcgttactttcgtctttttttgtctcctcggtgtggagtctgccgggcatggacacggagtctgcgctgggcattcggctccgaatgactgaagagtgattatttgcctgcgtctagacaatgtcaatattataccggcgagtctcctgaaatccctactgctgcaaggttttcccgggcgtttcgcgaacgttgtgcactattggtcgcattacgcggatgtgtggcattacgttcatcaagccgtccacatcgtggacgaacaaccgtccacgctacgaacgcaacctccaacagtagctccctctgatgggccgagccgtgaaggagaagcaaaggagctccccgtcgaggggagctgtcgtcgtaggcgactgaggggagatcgtaggctcagccctgaatcaccccatacccgtcatgcacaaacggcttgaaatcatcctggcgcggcccgcccggctcatgccgaatcgaacgatcagtaccgagcttcttctcagccctgagctgcggcacctcggtcaggtcatacggcgtggtctggtacacccagttgagccagttgcgccacagcagattggcgtgggcgcgccaggcgaacaacggttccagcttcggatcgtcatgcgggaagtagttcttcgggaagggcacgttggtcatgcccttggccatatcgcgctcgtattcttcggcgagcgtgtacttgccgtactcccaatggccgagcgcgaacacttcggagaagtcacgcgtggcgatcaggcccgggccggactgcggcccccaagtcaagatctgaaggtcatggttggcacgtacctcgttttcgttcacgccggcgaggcgggagtgcggctgcagatcaatctcgtcgaagccattggtcaggaagcagtattcgtcctgcaggtactgcgggaatacgccgaaaatcttctcggggtaatccaccttgtggatgccgtagcggtagtacagtgcgcccatcgcaccccagcacaggtatatggtggagaacacatgggtggaggcccagtcgagaatcgtcttgaactcgtcccagtagtccacatcttcgaacggcatatgctctacaggcgcgccggtgaccacaaaaccgtcgtaatagttgtctttgaacgcatcgaggttttcgtagaacttgacgagatgatcggcggaaacgtgcgtggcctcatgcgtggaggtcttcatgaagtcgatttcgacctgcagcggcgacttggaaatcagacgcagcagctgtgtttcagtctcgattttcttaggcatcaagttcaggatcaccagtttgagcgggcggacgcgctgacgctccgcctcgggcttctccagagcgaagatgcgctccgaatcgaggatatctctggccggcaggccactggggatcttgataggcatgttcctattatgtcaatattcgggataacggttcagggcattcctataacggccatttatggcgcgttattaccccgactccgactccgccccaaacccctcgctgcgtgagccaattcacgttttaaaaccgcgggaagatgacgcgacacgccgatgttgactttctggaatctgcacctattgtagatggagctgtctgagagacaagccgacgcggggtggagcagctcggtagctcgctgggctcataacccagaggtccatggttcaaatccatgccccgctaccaattgaccgccgttcccggaatcatccgggacggcggttttttgcatttgcaggacttttgccgccgtcaaattaacgtcagtaagatcgttaagcgttacgccaagataattcgcaactttcaccatgtcgtcaaaggtccacggatagccaatcttgagcatgcgcgagaacgactgcggaaacttgccaagaatcgccgccacatccttcttggggatatgacggacagaaataatcatgttgatgttcgttatagccacatcgccggccgccatgctggcggtgctgggcattgttattgttgctgtcataggttccatattaaacacagttgtttaactttgcaacacgccgagaattgccaaacatgcacattgggctgtaatacttaacatgtgagtttagctaagaacgtcagagttacagcaaatgtgcgatacttactccggcaaaaccgagttacgcagcgcgaccttgctgccgctctcggtatgcatgagcagaccttttccaacaaaatgtgcggcacgcgaccgttcaccttgcgcgacttgacccgcattgctgatttcttcgatgtgagcgtcgatttccttcttggtcgttctgattatgcgaaaccgttggaggtggcgtgatggctggcgtggaacgtgtggcggtgcatgtaagccgtctggcgcattgtcccgccgtgttcttcgttgagttctcgcgtgccggttcggtggggaacctcgttgttcctctggatcgttccgaggccgaagcgttgcgcgacgagcttggcgaagcgctgtcgggccggattacggaggccccggatgttagttgatggttttaatgatctccacgggttcagggcatccgtcccagacgatggtgaatttgatggggtaatgggctttgccgtccccgtcctccacgtgtccgtcaaagaacgcggtgccgccttgttgacgctcctctcgcagtttcggcagtccaatgttgaagaagtggacgtcgggcagcccccatggttcgctatcggttcttccgagatagttgttccatgtgttcgtgtaggttccctcgaccgcttcggcaaacacggagatgttgcgcgcggggcctccgatgttggtaaggacgaagcgcgacccgctttcgtcgatgtcgattctgaacttgggcggcatgggtggcttgcgagttgccggcgttgttgctggaaacatggcgtctatttcgtcattcgtgattggcgtcgcaggcccttccgctggtgtttccttccgggacgctttgctaacgaggccaataagttttttgacgatgaacgcgcccgccccaccgatgattgtcaatattgcgcaaatcgccatgacccagttcgggtcacccatgtcgatgttttgaaaccaattcgtaattccattcatgacgttcaatctacaaccggaggtgtctcgtgccgtatctgaagcctgagtccaccagcgacacgtttgacgtgttttgcagggtgaccgatggtggcaatccttatcgtttccatgtcctcgcggacatccgtgggcagttgttggacgtggatgggttgtcgatgggtgagttggtgacggtcaatcgtgagattgccagggccatcagggaggcgaagcatgcgcgccatctgtaggaccgtgctacgtggcctgtgcgtcgtggctgtgttgccgtcggtgctgctggcggttggtttgtgcgcgttctggcggtggctgtgggacgacgatgacgagaggagtcggtatgggtacggctactagggtctgcgtggataattacgaggcctatccgggtatcttccgtgtgtcgttcgactccggtgatgttcgcgcggcggtggtgctgacccgcccgcagttggagcagttgcgctcgtgcgtgactgattcgttggctcatgacgatgcggtgcggcgaagacgcggcggcgatctgtgacggcttgcgccgtcgataaccgaatatgcctttgaccacgccgaccgtcggttgcgtgcgaagcgtgatgaagtacccggccgcgccttgcccagcgcgttacaaacacaccacgtgtggcgtggtggttgaagcgtccctagcggggaggcgtgcgggttgcagctaaacgcacgtgtcgtgttcccagggacgaaagcggcaccatcggccccatgcgtggggtggcacgtgcgttgaccttcgtcgcggccttgcgccgctgaccatatgcgacggccttggctccatgccgaaatgcttcacatgtgggaacccttcgggaagaacgggaatcaggaaccttcttgattcttgttttcccaaagggttccccgctctaaccttccaccatccgaaattcattgattccatcgattacaggacttacccacttaaccgcctacgagctgattggagaacatcatgggttatgcagttgattacgtgccgacaagggaacgaaggaagattaagaagaagtaccgccgtgagcatgtgaccagcaaggcggtcagggctcgggatatgaggaacgcggttcggtggaatctgccgacgctagaacatgatacgaccggtaccgctactgtcgatcgttccatcgtcatcaatctgcttcgtttggaccgtatcagcccgaccgccgaccctaccggggaccatgcgatgcagcagctggtcagcgagggcattgtgcccaagccttttcgcatcgccggtaactgcgggttcgaccgcgacgacctgatcacgtcgctcaaggcatgggttggcctgctgtgaacccgcgcgtgaaactcaccgtcagccaggccgcaaggtatctgcatgtgtcgcggcgcacgatgcagcggatgcgggaccagggcacggggccggcgtacttccgagcgcgcggccgtgtgctgggcttgaagacctacgattgccgggatgtggccgcgtcactgaaacggtggtgccactgatgggccgtcgtttcctgtatgcgcgtgagctggccgagttcctgggcaagtccggtcagacgctctacatgtggcgcaagcagggccgtgggccgaagtggtacatgttggagggccgcgtggtgtatctcgtggacgatgtgaacaagtggatggggaagaggcaatgaagcgcaagagggtgccgccgaacatggccgcgcaagtgctgctcacgttcggctccgattgttggctggacatgccgggatgcacgcacaggggcacggagaccatggaccacgtgaagccttacagtctctacggcccgaccgttccgagcaatcttcggccggcgtgcaagcactgcaattcgttgcgcgcggatcgtgtggtgtccggcttcggcgcgcaggtcacggccgtgataggcccgccatgcgtgggcaagaccgcgtatgtgcgcgaccacatggcgccgggcgatatcgtggtggacccgtcgaggctggcggtcgcgtgcgtggacggcggcagcgaggcgcacgcgctggccgatacgttgtggggcagcgcgtaccggcgtgtgtcccgcatggtcacggccaggcatgtgtggctggtgcgtgcgctgccgacgtcccgcaacagtccgaacatgctggccgagtggatcgcgttgaactatgacgtggtggtcctggacgccgacgaccagctgttgcgcgggcgcatggccgagtgccggcgtggccgtgaagacgtggagctgctgaagcgatggcgccggctcggcatcacgcaagcgaaggtggacgggatgctggagacgcggcgcacgcagctttcgcggcttcgcctgatcgacggcccgtcttcgccgccggccgtgtcggcgcggccgcgatggtagccggttttttaaacggccatggtcaagggacaccccgcgcccaccgatttcgtatccccaacccaaataaaaaaagccgcgccggcaagggcgcggcgctccaccaatcggcggaatgaagccagttccagacagtaacaccgataggctaggagcgcaaatcatggacgacaacgacaagcagatgacacttccgggcatggaggacagcgacgagctgaccaacccgctgaccagctcgaccaaggagctcgtcaccgagctgttgcaggacgccgcgcagctgacgccgcaacggcgcgccctgtgtacgctgctgctcacgtgcgcccgcaccatcgaccgcctgtgtcgcaagggccgcgacatctcccgcatggtcacgagctacaacgagaccatcgaccggttgcagccgtccgaaacgtccgcgaaggccggcgacctcgcgcagctgctcaaggacatggcgcagtgaggccggcaccggcgcgccacgcgaccccgcgcgacccttcgcgtgagacggacggcggcaaggtggcgcgcatctccgccgcgttgggtcagccgctgatcccatggcaacgccaggtagcggacgtggccggtgagctggacccggaaacgggcacgtactactacgaccgcgttattgtgtccgttcaacgccaggcgggcaagacgacgataagcaaggccgagcaggtgcgtaacgcgctgcttggacccgaccgtgaggtgtggtatctcgcgcagaccggtaaggatagcaacgaacagtttcgcaagctgattaaaagcgtggtgcgctcccctctggcggcgctgatcgacgggaacccgcgcatgagcaacggcagcatggcgctgccgctcgtcaacggcagcacgttgcggccgggcagcatgaccgaaagcagcggccacggtttccagggcgatttcatcaacctcgatgaggtgtgggcgttgtcggcgctccaggccaagcagattctggatggctttatcccgacgacgaccacgcgcatgagggccacgggcgtccgtccgcaattgtggatcacaagcacggagggcacggccgaaagcgagtattacaacgcgcttctggaccggtgccgtgccggcgacatcccgaaacgttgggcgttcttcgattgggggcttgaccccgcgaaggacagcgaggacctggacgccgtagccagcgcgcacccgggttgcggctacctgttcgaccgtcggcagctcaaggactttcgcgaccagttcgcggacgacccggccggctggcggcgcgcgttctgcaatctccgtgacacgtccagcaccgaacgcgtctaccccgccgccttgtggacggagaccgagaccgcgccgctcgacctgtcggcgctcgacctggacacgctcgcgttcggcgtcgcggtcggcatggaatcggaatcgaccgcgatagccgccgcgtgccggcgcgatggcgtcaccgtcgtgcagatcgtggacgtgctgccgggcaccgccggcgcggccgaacggctggccgacctgcaatcacggtatggcggcgcgccgatagccatagaccggcgcggcccgtccgcgccgttggccgaccggttgcatgaggtcgcggcggacggcacgccggaataccggttgtcggatatcggcaacacggagatagtcgcggccggcgtgctcatgcttgaccggctcatgcaacgccaggtgttgcacgtgcctgatccggcgctggacgacgctgccgccgtcgcggtgcgccggtgggtcgccgacagttgggtgctgtcgcgccgcaacagcgaacaggcgattaacgcgcttgaggccgcgcaactcgcggtcaccgcttcgcttcacgcgcagccggccgcgccgttgcagattttcggttagacgttctatgacgtttttagacgttctgcgatgttcttatacgccggtttcggcgtggcgcgccggcgggcggttgaatcggccgcatgagcttcatttcccgcatctccaacaccgccgccctgttgcttcgcgcggcgcagacgacggacgacgtggaggaagcggacgcgccgacattgccgccgcgattgtccacgtcgcatgacccgctggcgttgtccaccgtatttcgcggcgtgcagatcatcgagacggcggtcagcaagctgccgctgatccagtacgcgccggacggctcgcgcatgcggccgagcacgctcatcacccggcccgacctgaaccgtagccgccgcgacctgttcggcgacctcgtttccgctctcgcgttgaacggtaacgcgttcctgctcaaggtcgaggcgggcggcgtgctcgtgggagtgcgcagtctgccaccccagctcgtgaccgtcactgacctgaacatggacccggctaacccgcgcttgcgctactcgtaccgtggcgtggactacggcgccgaccgcatcgtgcatctgaagctgttgaacgtggccggccgtttgcgcggcatgggccctatcagcgcggcccgcgaggagatcgagggagcgcaggacactcgcgcctacgcatcgaactggttggacaacacggcgcggcccgccggcatcctgaaaagcgaccagatattaagcgaccaggacgcgaggaccgctagcgaacggtgggcgaagggcggcgccggcggcgtgcgcgtgctcggcaagggcctggactacacgccgttggcgttgagccccgaagacctgcaattcatcgagtcccagcagttcaacaccacgcagatagcccgcctgttgggcatcccggcgtcgttgatgctcgcgaaggtggaaggcacttcgctgacctactcgaacatcgagcaagagtggctcacgttcgcggaatacactttgtcggcctacgctgacgagatttgcgaggccctcacgtcgctgctgcctgaggggcaatggtgcatgcccgactgggattcgttgcatcgttccgacacgaacacccgttacagcgcctaccagaccgccatatccgccggattcatgacggtggacgaggcgcgcgcccgtgagggatgggcgccgatcaaccagaccacaccgcaggaggtcacattatgagcgaagaggtacgcaccatcaccgtgaagggcatcgagctacgcgaggaccagggcgacggtacccgcatcgagggcatcgccgtgccgttcggccaacgcatcggattgtggcgcggcgcggccgaggagttcgcgccggattgcgatttcggcgacacgacacgcaccaagttgagccgtgaccacgaccgtctcatcggcaaggtcacgaacgcgacgcgcgaggccgacggattgcacatcaccgcgtcaatcagcgacacggccgagggtcgcgacgccgtgcagctgatccgcgacggcgtgcttgattcgttcagcgtgggcttcatgcccgtgaccaccgacaagcgcaccgagggcgacacgagcgtgtacgtgcggcgcgccgtgaaactgcttgaggtcgccgtcaccggcatacccgcgtacacgggcgcggccatcaccggccaacgggaccaggaacacgtcaaccaggaaaccgacaccaaggaggaaacagtggaaaacgaacagcagccggcgacggaatcgcgtttcgaccagctcgaaatgcagatccgttcgctcgcggacaccatcggccggcagaagccggacccgccgcacgtcatcggtggccaataccgttcggccggcgagttcgcgaaggcgcttgcggccggcgacgacaccgcgtatgagttcatgcgcgaggcccgcgacctgatttccagcgccgacacgaacaacactaacgagtgggtcgccgaccagatcaagctcatccagtcgcgccgtagcgtcgcgaacctgttccagcatgccgcgctgccggccaccggcatgacgctggaatatctcaagctcggctctaacacgctgaaggtggccgaacagacggccgagggcgcggccctgaccaccggcaaaatcacgctcacgagcgcgaccgccgccgtgaagacctatggaggttacgcgccgctgtcgcgccaggtcatcgaacgcagcaacacgcccgcgctcgataccgcgctccgcgcgctcaccatcgcttacagcaacgcggtggaggcggcggcccgcgcgcagctgactgccgccatcaccggcgccgcagcgaacaagctggagacgccggcggccgtgagcgcgctcaccgccgaccagtggattaccgtcatcatcaacgcggccgaggcggcggacggccgaggcgcgcagctcggcacgctcgcggtcagcaaggacgtatttgacaagatggcgaagatcacgcgcagcggcgacgcgctcatggacgtttccggcgagggcgtggacaagctcggcagcctgagccttaccggcatcaccggccgcatgctgtccgtccccgtgcagatggtgccgggtgccgccgcgaacacggccgcgttcatcgacccgaccgcgttgcagatgtgggaggccggcggcccgttccagctccagcaggacgacaccacgaaactgctttccaattacagcgtgtacggttacgcggcgttcgcgaccgtgttcaccggcggcgtcatgccgttgggtccgaaggccaccgcctgagtaggcgcacatggaccagttgcatgacaagttcctgtcgatgatgaacgtcatcggcagcgacgacgagacgcgcgccgacgactgtctggcgacggcgcgcgcatacctgtcgacgaacctgggcgagacgtgggacacggtgcccgacctgatccagtccgattgcgtgctggcggtcgccgccgacctgttcaaccagaaggacgcgcgcaacggcgtgatgaacgtggacagcgacgccatcgaaccgttccgcgtctccgccgacccgttgcgcgccgcctggccgaagctccgcgccgccggcgtgctcgcgggaatggggatcgcatgacaaacaccatcaccggcaagatcgacgcgctcatggaacaggtggccggcgcgtgcggcgacctcgtggaacacgtcaccatcgacgagaccgaggtgaagccgccacgcggcaaggtctgcgtatgggtcaaaccccccgaagtggcatggccctacgcgggcgcggaaaacgaactatcggtgcggctcgtgttcgtcgccggcagtccctgggcgcaggcgtccgcgctgccgctgctactggccgcgatggaccggctcgcggcgtccgcgctgcctgtcacatcggccgagcccgtcggcttcacgcgtggagacgcgacgctcgcggcctaccagatcacactcaatgaaatctaacgaaaggaacaaccatcatggcggacaaaatccgtaccctgggaccgggaagcctggtcatcggctcctcagacgaccagtacaagctggacgtcgattgcacgagcgtggaactgtcgccggacaattccagcgaggaccccgacacgtacctggacggccacgaggagggcggcgcgctcagcacgtcgtggaagctgtcgggaagcatcggcgaggacttcagcatgaacggcgcgcaggtgtattgcctgaacaatgcgggcgagaccaagcccgcgaagttcatcccgaacacgtccggcgcgctccagctcgacatgaccgtgaccatagcgccaatcgcgttcggcggtgacgtgaagacgaagaacaagaaggatttcgagttctccgccaccggcgtgaaggccagcgcgtacacgaagccgagcgcctgaacatggcggacaaggccctgtacgtcgtcggccagaagcgtttcgttcagaccatgcgcaaggccggcgcggatatgcaggagctcaaggaagtcaaccgcagggccgccgacatcgcaaaacccgaggcggtggcccgcgcgccacgcggcaagaccggcagactggccggttccatccgcgccggcgccacgcagaaggccggtatcatccgcgccggacgcaagaccgtgccgtatgcgggcccgatcaattacggctggccggcgcgcaacatcagaccgagaacgttcgtgaacgacgccgtggcatcgacagagagccaatgggcgaaggaatacgaaacgttcgtgaagaagaccatgaaccagatcaagggagcctagatcatgcgaagcacagcgaaagtcacgtacaccgacgggcatgtggacgaagcgccgttgacgccgcgcgtcatcacgtcggcggaggagcacgcgcagaaggagggatgggcgccgggcgaggcatccaagattcgccagtcgtactacatggcgtatctggcgcaacgatacgcgggcaacaccaccatgccttacgcgcagtggctggaagaggtggacgacatcgacgtggagacgccgaccgctgaaaaccctaccgtctagccgagtggcccgacgattcgctgggcatgctgtcgttcctgctcgcggcccgtttcggcggcacgccgtgggcatggaggcatgaggccagcgaactcgattggggcaccggcatgaggttattgcaggacgagatagaacacatggaggaggtggaccgtgggtaaaagcgccatcatgagcgtgcggatcactggcaacagcgacgacgcggtgaaggcattgtccaaggtcacggccaaggccagcgcgttcggcacgttcatgggcggcgcggcgctcaagggcgtttccgcgttgtgggacacgctcaagggcttcaccagcgcggtcatggacatgtccgattccacggacaagttcaaaaacaccatgaatttcgccggcttcgacacgagcgccgtggaggccgcgacgaaggccacgcgcgaatacgccgacaaaaccgtctacgacctgaccaccgtgcagaacaccacggcgcagctcgcggccaacggcatccaggattacgtcggactcaccgaagccgccggcaacctgaacgccgtggccggcggcaacgccgaaacgttcaaaagcgtcgccatggtcatgacgcagaccgccggcgcggggaaattgacgaccgagaactggaaccagctgacagacgccataccgggcgcggccggcaagctccaggaagccatgctgaacgcgggcgcgtacacgggcaatttccgcgaggccatggaaaaaggcgagatcacggccgacgagttcaacaaggccatcatggacctgggcatgaccgacgtcgccaaggaagcggccacgagcacgcagaccatggaaggcgcgctgggcaatcttgaggccgcagtaaccggcggattgacggacgctttcaatctgttcaaaccggccgtgaccagcgccatgaccgtggccgccgacaagatcagcgcgttcagcggcaaggcgacgaccggattgcagggcgtgataaagctcgtgcgtgacggtgatttcagcagcgaattgcgcgaagcgttcaacatcgatgaagacagtcccgtcgttgatttcctgctcaccatccgcgacaacgcggtgagcgcgttcgatacggcgaagcagaaggccggcgagttcgtggccgcattccagaacaccggcccgatgcaggccgctgcggacatcttcggcgcggtgtgggaggcgtgcaagaacctcgccggcgcggccggtgacgtcatcggccagttcacgccgttggcggattctatgggcggcgcgtccggcgccggccaggcgttgggtgacgcattcaacggcgctgccgatatcgtcggcatggtttcggacaagctcacggcgttcagcgactgggtatccgagcatgcggaacccgtcgcgtccgcgcttgtgggcatcgcggcgggtttcgccgcgttcaaggtcgcttcggccatcagcgccgtcgtgtccgcgttgcagggattcagcgtggcgaccacggccgcttctgtggcgcagtgggccatgaacgcggccatgaacgcgaaccccatcgccatcgtcatcaccgcgatagccgcgctggtggcggctctcgtctacttcttcacgcagaccgagaccggccgtcagatatgggcgtcgttcacatcatggctgggatcgtgcgtgggcaacatcgtgggattcttccaggcgttgccgggcaagattggcggcttcttccagtcggcagcgcagttcgcgaccgacaagtgggatgcagtcgtggcgtggttcaggggcattccgggacgtatcaccggcgcgataggcaatgtggggcacctgctgtacaacgccggcgcatcgatcatcagcggtttccttgacggtctgaaaagcatgtgggattccgtgacgggctggatttccggcatcggcgactggataaccgagcacaagggaccgccggaatacgacgccgtgatgctcgtcaataacggccgtctcatcatgcagggcttcgccaagggcttgcgcagcggtttcgacaccgacgtgcggcgcaccatctcacggatcaacggccgtatgggagggctcagcctggacgccggcatgaacggcggcacggtgggcggaaccgtggtgaacgtcacgttcaacgctccggtggaccgtgagggcgtggcgcgcgagatcaggaagattctcggcgattacgacaggaagcggggcaactagtgcagcagtgtttcatgttcctggactggggcgacggctggaagtccgtcaacgaccatgccgaggacgtggccgcgttggccggcttcagcatccagtggggcaccgatgacctcgccgaacagcccgaaccgtcggtgatgtcgttcaccttgcgggatcgtaccgggtggctcaccggccgcgcgctcacattggccggggcccgcgtgctcgtgcagatcagcgaacagcccacgtggggcatgctccgagacgatatgggcccatggtcggcgcagcatatgcgagtggaagcgatgcaccaggcttacacgcccggcctgccttccagcacgttcagcacggcaatcaccctgttcgacggactggtgcagaacggcggcgacgcgcgaccgcatggcgacggatggctgctggaattgagcgccagcggtcgcatgatcctgtggaagagattgcagaagcaggggccaacgtcatccgacgccaggtatgcgggactgcattgggtcgccggcatgagcggccgtgtggaagagctcaaccggcgcgccgccgacgccgacgctccccgggtctccgtatccggtttgacctccaccgattccatggcggcctataagaccgacgattatccgtcccaactggatttgctgcatcgcacgttcgcgcatgagagcatgtggcccatctggtacgaatacccggatcgtgcggtgagccgtctggattacatgccgttcggcgttcccgtgacgctcggcgtcgataccgtgggacggttcaccgtgaccgactggaccggagagacgctggacggtttggacgctgccgaaatcatcatcgacgacgaacagacgctgaccatcccggaacccgtcacgcagttcgtcatccagggcaagaccgcgaaggcaagcgacggcgtgcttgagttcgaccagcacgacaccgagctatccgacctcggcacgctgccggccaacctgaaaaccacccagtcaagcgtcaccgttgaagccgacgtggtttcagcggacgaaagcggcggagtgtggacccgcgcaggcggcaccgtatggacgcctggcgacgatgaacgcgcggcgttctcccgtctgctcgtcacggttgaccggcgattgcggccggagaccatcgtgttcgacagccgcaggctcgacccagcaacgcacgcgcgcctgtatctcaccgccagcagcggcccgctggtcatccagggagccacgtcgtcacggctcgccggcgacgacggaaacccggcggcatccggcgcgtgggcaagcatcggcggcacgctcacctaccagtggaggagcggccggccactgctccgcaacgaggtgacgttatggccgctgccagtcgccgcagctgccgtcgccacctgggcagacatgggctcatggcccgtcacctggactcaggcggcgttcaccttagctgaactcgcgctgattcacgactaccagcaacaaaccaccatggaggaatcatgaagaccacggacatctacggacttccatacatcgaggccgacgacctcgtatccgccgcgccggcgcagttcaagaccatggccgagggcatcgaaaccgctctggccgaggtcgattcacgcaacacgccggccggggtgaaacccgtcatcgcgaccacgctggaggcgctggccgcgcagaccggcgtcaccggccagaccggctacgtcaccgccgacacgacgacggcgaacaacggcccgtatttctggaacggctccgcgtggctcccctacgcgaccggcggcatgctggacgatttgcggaaccaactgacacagggttatgagtccggcacgttcagcggacagacgaacggcgacgccgtggcggaaatctcgtggaagtcccacacgaccaaaccggcgggcatggtcgtcacgagactgcgaatcgacaaccaatccgacgattccacggtgtacatagtgccttacctgtggtccctgcgacccggttcggcatgggtgcggttccgcaacaacctcatgaacacgtgggccacgacgtacgcggtgagtttctgctggttcgcctggtgggactaggcgaacgtcacgccggccggtatcggcagcgttcgcggcgtgtgcaggcacctgtcgttgaccgccatgccgccgattaccgaaacgctgccgtcggtgttccacttcgcctgtttcgcgaagttgctgccgggaatggaccagagacagccgagactcacggccctggatggcttcggccctgatgcgtagtggaagaccgggaaatcggacgacagcgacacggtgcttttgaagccgctcagatgcacgtgcagcaggcggttggccctgtccacgacgatttccattccgccgccgtaggagtccggctggaaactgccggtgttctgccaggtgaatttcgcggactcataaccctgtgaaccacacccccgatgaagggagatcatgaccgagaacgtaatcatcgcaatagtcggcgctgtcggcgtcgtcgccggcgcgttcgcgcagcagctcgtgacggcggcacgcgaccgtatggaagcgtaccggctcgcgcagcagatgcaggccgacaacgcgctgctgtggcaatggaaccgacagctggttgaccacatctacaagggattggggccaccgccgcccgaaccccctgaaaaccttttcgaccacgacgactgacggaaggagagaaacatggtcggatacgcgaaggccgtgtggcgcggcagcccgaaccactatcaaggccgcaacggctacaaggtgacgcacatcacgctgcacatcatggtcggctcgctccagggcacggataccgtgttccagcgatccagctaccgggcgtccagcacctacggcgtcggcacagacggcaccgtctaccagtgggttgacgagatcaatggtgcctggtgcgacgcgaacatggccagcgactgctcaggcatcagcatcgagcacgccggcggtatcgccggcatcgcgccgaccgacgccgaatatgaggcgtccgcgcagctctgcgcggatatcgcccgccgttacgggtggacgaagctgtggcacgacgagaccggcaaccgcaccggcaatatcgtgctgcaccgcgaggtgcccggcacggatcacgccggctgccccgatagggccgtgaacggcctggacgtggcccgcgtcatcaacagggcgaatcagattctgaacaaccaaggaggaacagacatgagttgcgcgcttatgatccgcgacgacgacaccggcgtggtctattactggagcccggagacaggccgcatcggtttggggcatcccgaccagatgaaggtgctggaggacgctggcgtgaagctgatccattccagcaagaaggccacgtgggccgcccgcgccgatcagatcagcggttacgtgcaggctaagaccaccgcgtatgagaaggcccagacggccgcgctggaagctctggcgaaatcggtgggcgcgaacccatccgacatcaccaagaccgtgagcgaggccgtcaacgcggcgctgaagaacctcacggtgacgctcacgaacaaggaggcatgatggattacggagaggaacaggtggaaggcggcgacccgcgtacgccaggcgtcagcggtgcgaccatcgcccgcgccctcgtgctgctgctcggcttgattaacgcatgcctggtcatgttcggcgtcgataccatccccatcgccgacgagacggttaaccagctcgtcgcgctcgtgtggaacgtgggcgccgcgctgtgggcgtggtggaaggacaaccccatcacacccaagtcgcgcgcgcagcacgcggcctagccggccaacgtcaccgcgtccagaccgacacgcagccggctatccggcattgccacgtagatttgcgtggtctccacactgctatgccccagcagcttcgagaccagcagcagatcgtgcgtggtctcgtacatgcgcgtggcgtaccggtggcgcagcgagtgcggcccccaaccgtccggcagcagccgtgtgaggtggcgggacacatacgatttttcgacgtgtccccgccaccggccggggaacagccaaccgggcgcggccgttatccgcttcgccaggtcctcgcttatgggcactatgcgctgtttgtcgcccttgccccgcactatcagcgacgggccggcgtcgccttccagcacgtcgcgcgagtggacggccgcgatttcggacagcctcaacccggcttctgctccgagacgcagcatgagccgttccacatcgttcgcggcgcacatggcagcgtatatgtgcacgtcggggcacgggcggggatgcggccgcgtcttgcgcaccttcggcagcgcggcggccggatcgtccgcgcgccggcccgtggcatgcagccaccggaaaaaaccgacgagcgtgtttcggtagcccttgcgcgtctccgccttccatgattgcgaggcggtccaatgcactagatcctccgacgtcacgtcatagggcgatttatccaggcaccgcgccgcgtggcctatcttgcaccgccgcgtgttgacggtgtcctgactgaggcccgccgccgtgagcgattcgagccatagggtgatttcgtcccgccactgagcagggggcagctttttgtgcatactcacggccggcatccttggcggccggcggcattacgccgctaggataaaatcaaataatcgggcttcatggatttgaaccgtggacctctggacaacaacgttaccagaggtccacggttcaaatccatgccccgctacgaacgtggttatatggccgctgatttcggtaccgaaatcagcggcctttccgtttaccgtggcgatatggatgaaaggcgatcaggcagctacggtgcccagggaagtcggcgatcataaacgtctcgtcattttcatcgcggatcttcagttgtctaatccacgggaggcgacaggcgtgaagtttctcaacgaagcggaagccgggcacaagtcgtatgttacgatcgacttcgtgcccagctcccgttcttctgctcagaagcggagtgtggttcaccatccagccgacatcatcggcatcatgccgcagcgggtcaacgtatcggccagcgcatcgtccagtgcttgaatcggtcatagcgacgacgccaccgaacgacgatggacagtatggcgcctatcgccagagctgacacggccagaaccgaggcaagcgacacatcgccacccgtgacgggcagtgacgggcgagggttgggcgtggttgcctccgccggcgccggcggcgtctcgggtttctccggttcgcacggtttctccgactcgcatgggggcaacacccgcacacgctcccaggcatcgtcataccggctggacgccggggaaacacggtcatccccctcgaaccgccagacgaacacgtaccacccaggccgttcggcggtcagatacataggagcgccatgcgcgtccaacgccccggcgccgattttgaacgtgccgttcatcgcgggaatctcccaggtggccagcaaccggtggttgtcgtcttccgtgggaacctctcccccagatggcttgtacgcctcatcgttggaggggttgtcgggatcgccggaccaccatacgctcaccgtcgcatacggccgatccgccgcgaactcatactcttcgttgccggcatactggccatgatccgcagggaatcccgatacggtaatggtgtcgctgagctcggcaccgatatccgccgaatgctcagtgaccgtcgacatgacttctagcttcctgcgacttgtattgctttccgtagcctccataaacggacttatccagtcgcctataaggtattcctgcgcctgtttgctctgctcggaccgccgaaacacccatacccatgtgccaaaaccgctattctgcttggtccggtaagcggcaccgtcatccggcttggtcatggcctgcacacgtgcctgctgccccaccccggtgaaagaggccttgccataggccaccggctcataacccaaagtcgccaatcgcgcaagaaaagcatcggcgctctcttgtgcattcggcgtaatgacattgcccacatcgcccgtatcaagaccatcgaaatagtatccgcgggcctgcaattccaaatcgggcacccaataactgtccgcatccgccacgccactggtcacgtcatcgaacaccggagaagccacatcaagcaccttctcggagaccttggtggataccgccggaacaaaatccttacgcacccgaaatgtcgtcgacgcgccgccagtggaagccatcgagtcaaaggccagcatgtcctgagtgctgtccatgacgtgcatccgcccatactcgtatgtggtgttcgccgtcacctcgccggcgccggtcgcctcccacgcgatcgaggacccggcgctcgtcgacacccccgagaacgtgttgccgccttggacgaaccgcgccgccccctgcaaggtgacggtgaacggcactcccgcgatcgcgtcaccggcgcggttcaccactttcaccgagatggaaccgctgcgcaaagcctcggcatcggtgcgttccaccgtcgtgcccgcaggcgtcttgccggccgattgatcccatatccgggccgccttcgccacgatctcggggtaccggccttgaatgaccgccatctgtctcgcccactcgtcccgatcgcgcccgaagtgatcctgcacgatgatgccgatcgccgcatgggtggcggcatccgtgtcgcggtaccggtcaaggatccatgccatacgccgggcgttctcatcggaggcaagcaccgtggtggggcctatcacatagtcgctcagtttccccgcttcgatgcagtagtacttgttgcccgaagcgtccagccccgcgacaccgacgtaatattccatatcgttgtatggaaacgccacgtgatatctttcgtcggcgggcgtcaacgtcgcggcatacgccgtattcgccgagccgaacaccactcccaccattattatcagaccggtcagcatcgctacgatggccatgccccgttgccgccatgtcgttatcatcattcgtcctttcctggtacgtttccccgcatactgcactgtgtgcgggtaggccacgatcatggcagattttcattcgctacagccggtttttcgacctatgtggtccgagcttgccgtttgccggcgagttgtggataactcttccgccgagttatccacctcatgcggttgaccgaacgtttacctgatagttatccacaatgcgcaacatatgttcaaaagcccttagaatagggccttatggcagcagtacaacatcgcgcgaccacgcgcactagtaataccgataacagcaccacgaaaacgaagtcaaaggcgacttctgcccgaaagagccccgcaaccaagcgcaagagagtcagcgccgaaacggcacgcgccgcagcagcgctgaaaggcctggctgtcgaagcccccgcaccgtccatcgaagcaaacgagcccggccagttcggccgcatcaatgtcatggacatcactcccgccgaggagcgcggcatcttccccgcccgtgtggaactcggcgaaccgtttgagatgaccgcccaggtgttcatcgaaggccgtaccaaggtgggtgccaccgccatcgtgcgcaacccgcgcggcaaggaaaccatgcgccgggccatgacctgcgtaaatcccggcctcgatcgttggaccgtgatggtcaagtgcggcgagcacagcgatctgaagccttgggaggatggctacgcggccgtcaagcgtcagctcggcgaatggaccgtgaccatcgaaggttgggaagacgcgtacgtctcctggctgcacgacgcccgcatcaaggtgcgtgtgatggacgacgtggacaacgcactcaattccggtgccgagttgctggcccgttgggccgaaaccccggacaccggcctgaccgcacgcgatcgcaagaccttggagaaggccgctgagaccatggccgatcagacgctgagcgccgaggatcgtctcgccgccggcgacaacccgaccatcgccgccctgcacgagactcacccgctgcgcgacggcatctcccccagccagccccagcgcttcaaggtggaacgcccgaagtccagcttcgcggcttggtaccagttcttcccgcgttccgaaggcgccaccatcgatccgaacaccggcaagatcattcagggtacgctgaagacttcgatggccggcctcgaacgcgccgctgccgagggcttcgacatcgtctacctgccgccggtcttcccgattggcgtgaccaaccgcaagggccgcaacaacacgctggtcgccggccccgatgacccgggctccccgttcggcatcggctccgagctaggtggccacgacaccgtggatccactgctcggcaccatggacgatttcaaggccctgtgccagcgtgcacatgaactgggtctggaaatcgcgcttgatttcgccctgcagtgctcgcccgatcacccgtgggtcaaggcccacccgaactggttccgccacaagccggacggctccatcgccttcgccgagaacccgccgaagaagtatcaggacatctacccgatcgacttcaacgccgacatgcccggcatcgaaaaagaagtcgaacgcatcatgaatctgtggatcgaggcgggcgtcaccatcttccgcatcgataacccgcacaccaagccggtgcgtttctggcaggacgtgattgccgccgtgaccaagaagcacccggagatcctgttcctggccgaggcattcacccgcccgggcatgatgcgcgccctgagctacgtgggcttcacccagtcccactgctacttcccgtggcgcaacaccaaggacgaactggaagagtatctgccggtcaccaatggcgacgacggctactaccagcacaacaccttctggcccaccacgccggatattctcaccgcttacgtgcgagacaacggcgtagccggccactgcgtgcgtgcggtgctggcagccatgggctcgccgtcctggggtatctacaacggttacgaactcatcgagaacaagcagcgccccggcttcgaagagcagatcgacaacgagaagtacgaggtcaaggttcgcgattggagcaaggccaagcagtacggcgtggccgagatgctcaccgcactcaacaagattcgtcgcgcccacccggccgcgttgagctaccacaacctcaccgtgctgcctacgtccgacccgaatattctggctttcgcacgccacacgccggccgaactgaccggtaccggccaagcggacacgctgattgtggtcgtgaacctcgatggacacaacgcacaccagtcgatgattcacctggaactcagcgagctgggtctgcccaccgaccgcccgctcaacgtgcgcgacgagctgaccggccgcgaattccagtggggttgggacaactacgtgtctctggctccttgggcggatgtggcccacatcctgtccgtgcagtgatgcggtactgcaacggtaatgcaacagtgatgccgttgacgtgcatgggtttatcgtgcgcgtaaaccgctagaaatcctcccctcaaggggaggatttcgtctgtttgggcatagtgtcggcataatctcagcacggtttcttgagttccgcacctgttttgcaggcgtaaacagggtattgtggtgagacgataacgtaactgtcgattttcaaggagaaatgacatggcagaaaccttcaacgtcgttgtggaaattccgcgcggctccaagaacaagtacgaagtcgatcacgagaccggtcgcgtcttcctggaccgtaccctgttcaccgcaatgggttacccggatgactacggctacatcgacggcaccctgggcgaggacggcgatccgctggacgctctcgtgatgattccgaactccgtgttcccgggctgcgtggtcgagtgccgcgccgtgggcctgtaccacatggtcgacgaggccggcggcgacgacaaggtgctgtgcgtgcccgccgacgttcgtttcgatgacatcaaggacatcgacgacgtcaacgagtaccacaaggccgaaatcaagcacttcttcgagcagtacaaggctctggagccgggcaaggaagtcctgccgggcgactactggactggtgctgacgccgccgaaaaggaaatcattgccgcgcgtcagcgtctcgccgattccgagaagtgattcgattctgaatcgttgacaggaggccccttcgggggccttttgttgtatttgtggcaaagccgctctactctccctcagtcgcagtttcactgcgccagctccccaacagagggagcttgtattttgtgatacagtaatgttttgtcttttcaactaggcgtaggcggcgtgtaggaacgctggtcgaggcccatcgcacggtaatccggcgatgaaccttctgtcacaccatgatttcgataatcattcaaatcctgcttatttctgtttccgtagctatggatgcattcgccgtatccattggcaaaggcctgaccgtatcccgcgtacgagtacaagacgccgtgaaaagcaccctctggttcggcggattccagatgctgttccctattctcggctatttcgcggcatctacattcagcaaatacgtaacccaattcgaccattggatcatcttcgccctgttggtgttcatcggcggcaacatggttcacgaagccttcgaagaagatgaggaaaactccaaggagaccgcccagttcgattggaagcatatgcttcccctggccgtggcctgcagcatcgatgcgttcgccgtgggcgtgagcctggccttcatgttcaccaaagcccatatggcattcgccatcctcagcatcggtgtggtcaccggactgttctccgctgcgggcctgcacattggccgcgcgttcggttcccgctggcagaagccggcgcagatcgccggcggcgtggtgctgattctactcggcatcaaagtgctattggagcatttgggcgttatcgcgttctgatttagtgtcataagccccttcaccagaaagggctattttgtttgatttcaccgttccaatgcccgacgtaggattgggatggaaattcgattatctgagaggcgtatcatgaccgagatcacccaggagggttggaagaacaaagccctgagcatgttgttggcccaactgacgtcctatgtactgctcatcgcagccacggtcattccctcccctggcaccgtccccatcatccctttgattatcgccgctctgacgttggccgcatttgtcgtgttctggccgttccgcggcagcatgctggatcgtatcgtcactttggtgtttggcgcgatttctctgattttcgtcatcgtacctttcccgaccggcaaggttccgccggatcagaccgctgcggatggctcggtacttccttggtattcatgggcactggccatgggcctgctgctggtggtgctggtggtcttctccttcggacgccagatggctcgtgagaagcgcgaacatcttatccgcgcactctctcacgccgtgacttccggtgtggcagctctcgccgtggccggctggtgcttcctacctgatttgggcgcgatgctcgccaagggcaccgttgcgggaaccgttgccctgatcatcctcatcgttttgggactggctttggccgtggcttccacgttgtgggtgcgcgacgccgatccggacccggatatccgttatccgtggatcggtaccggcctgatgccggtaatgctgatgggcgtgaccatcgccgcaaccgcactggtgctcggccgtatcatcggttgatggacgtccaccgttccatattccgcaaacttgtaacctatgtgtccactacaagcgcgtagaataatgaaaaccgtgcgaaagcggcataacgccgctgacgactcgtacagccacaccgagcaattgcgtaacacattgcaggataagggggattagcgtgacggatcttacgttgatgactttcgccagcgaccccgccaccgttttgccatcactcgccctgctttctcatcgcgtccgcgtactgccgatggatgcagccagcttggtgaagatgccggagaacaccattctgtttctggatgcacgcgatgatctggcgaccgccaaaaccttgtgccgcctcatccacgcttccggcctgtccacgccaatcgtgctggtgctgaccgaaggcggcttcaccgtggtcaactcccagtggggcattgcggatgtggtggtcgccaccgcttccccggccgaagtcgagggccgattgcgattggtctccgagcgcggcaacgctcccgcagccgcagcagccggttctcccgccgaatccaccaccacggtggaagatggccagatttgctccggcgacctcattgtggacaccaacggctataccgcctccctgcatggacgccccatcgatctggcatacaaggagttcgaactcctcaagtacttggtccagcaccccggccgcgtgttcacgcgcgcccagttgctgcaggaagtatggggctacgactactacggtggcactcgtacggtcgacgtgcatatccgtcgtctgcgcgccaagctcggcggcgaatacgaacacctcatcggcaccgtgcgcaacgtgggctaccgattcgacccgccggagacggataaggaaactgccgccgcacagcaggccgccaaagcatcctctgccgccatcgacaccgatgacgatactcccgatctcaacaccgtcgcctgacagaccagcggcgctgcaaactatcaatcatcgatattacgccgcttaggtccatacgatgagagaaaccaaatccgcgcgtctcacgcgcatgcatgacgaatacgacattctgcgccaggtgattccggcacccgcttgcgcactgcatttctcgaatccgctcgaattgctgatcgccaccgtgctcagcgcccagaccaccgacaagcgtgtcaacacggtcaccccggaactgttcgccacctaccccaccgcccgtgacttggcggccgcaaacccggcccaagtcgaagacatcattcatccgctggggttctatcgttcgaaaacccagcatctcatcggactggccacggcactggacgaacgattcggcggcgtggtgccgcgcacgatggatgaactgaccagcttgccgggggtcggccgcaaaaccgcgaacgtcgtgctcggcaacgcgttcgatatccccggattcccggtcgatacgcatgtgatgcgcgtaaccggacgactgcgttggcggtcggattggcggtccgcacaccccgatcccgtgaaaatcgagaaggaaatcacctcctgttttccgcccgaagagtggacgaatctcagccaccgactgattctgttcggccgggccacctgccacgcacgtacccctgactgcgccaactgcccgctgtccgacacctgccctagctatgcgccgcccgccggcaagagcacgtccaagcgctaactcatacctcatcatggtgaattgcggattctaggctgaatccaccgctagactgaaaaccatgcagcacagcaagcgggacaatacatggtccaagtgggggatttttctcggagtcgccgtggcactcggcgcactcgtggttgtgggatggacgttcatgcaaaaccggttccagccgggatcatccctcgatgccgatgtgaccattggcatcgacgatatgccgcaatccttggatattcggtccgattcctctgcggcagccgaacgcctgctcgtcgacaatgtgtatgagacattagtgaccgtcgatcaagacaacaagcttcagccgggactggcgacaagctggaagacttccgatgacggactgaccgtcaccctgacactgcaatcgggcgtcaccttctcgaacggccatacgttggacgcctcggacgccgtgtggtcgttgcaacagaacgtgaccaacaaggtggcggacgtcgacgaattgggcgatctggcgtcggtcgccaatccgaacgccaccacggtggtcattacgcttgccaagcccaatccgacgctgctgcgagcgctgtccggcagactcggcattgtctacgattccgagtcgtccagtgccgattatcaacgcaaggccataggttccggaccattcaccgtggccgatttccagcctggccattccctgaagctggcgcgcagcgatacctaccatggcaccaaagcggccagcaatgtcgttgaatttatgcaatactccgacgccgatgcgctcagcaaggccctgaccgacggcagtctcgatatggcggcaccggtttcggcttcgacggccaccggcttgaacggcaaggatggcctgaccgtcaaggagggggccactacggataaggtgctgctggcctacaacaacggcaccgattcgctgctctccgacgaacaggcgcgtaaagccttccgctatcaaatcgacgcagccggcatcgcctccgcccaacccgacgcagccggagcattgggcggccccatcagcctgctggaacccggatacgaagatttgaccggactgtacccgcatgacgaaaaccaagctgggcagatgttctcctactttggtgcgcaatacctgactacggtgaatctggtggttcccgaagaataccggtcgttggccgaaaccatcaagcagcagatcgagcggcagccgcgccccacggtgaaccttgaagtgctctccgatgaggattatgccaaacgaatcaaggacggcaaatgggaactgaccgtgatgagcatggacggcacggatgatgccggcatattcgccgaccccgattccatgttccattacgaccataccgaagcgcaacaggcctatgcggatgctcgcgccgccactaatgacgccgattatgaggcacgaatgaaggcgtacgcccggctgatcagcgaggatgcggccagtgattggctgtatacccgcaaatgcttcactgtggcgtccaccaaggtctccggctacccgacctcgatgatcaatcgccgcatgccgctggccgggttgacggtgaagtaggcaaccttcagtcacggacgggctacgcccgatagtccttggctcactatcgttcgatcgttcgtacctcgcctgcgaacagcctactgggctgtttactgtacagttcggcttgtcatgcaacgtgcataaactttggccttatgactgaaggcaaatccatcatcaacgccaacctcaccccgctgcccgacaaggtcggcgtggacggacttgaggacaagtggcgcaccgtctgggatgaagacggcacctacaaattccgcaacacccgcgaccgcaaggccgtctactccatcgacaccccgccgcccaccgtctccggttcgctgcacgtgggtcacgtgttctcttacacgcacaccgatgtgattgcgcgctacaagcgcatgcgcggctacgacgtgttctacccgatgggttgggatgacaacggcctgcctaccgagcgccgcgtgcagaactactatggcgtgcgcgtggacgtgtctctgccttacgacccggacttcaagccgccgtttgaaggcactgatggcaagaagattgacgccaaggatcaggtgccgatttcccgcaagaacttcatcgagctgtgcgagcgtctgactgctcaggatgagaagctgtttgaggccctgtggcgcaagctgggtctgtccatcgactggtcgcagacctaccacaccatcggtcagcacccgcagcgtgtggcccagaaggccttcctgcgcaacctcgcccgtggcgaggcctaccagcaggacgcccccggcctgtgggatgtgaccttccagaccgccgtggcccaggccgagctcgaatcgcgcgaataccccggcttctaccacaaggtggccttccgctttgaggacggcaccccgatctacatcgagaccacccgccccgaactgctggcggcctgcacctcgctgatcgccaacccgaacgacgaacgctacaagcagtacttcggccagtacgtctactcccctctgttcaaggtcaaggtgccgattctggcgcacccggccgccgaaatggacaagggtgccggtatcgccatgtgctgtacgttcggtgatgtaaccgacgtcgagtggtggcgcgacctgaagctgcccacccgcccgatcatccagcgcaacggccgtatcgtgatggataccccggactggatcgaggacccggccggccgcgaggtctttgccgaaaccgctggcaagaccacgttctccgcccgcaagatcatcgtcgacaagctgcgcgagtccggcgatctggacggcgagccgaccccgaccaagcgtatgacgaacttctacgagaagggcgacaagccgctcgagatcgtcacctcccgccagtggtatttgaagaacggcggtaccgacgccaagctgaacgccgagcttatcgagcgtggcaaggaactcgagttccaccccgacttcatgcgcgtgcgttatgagaactgggtgcacggcctgaacggcgactggctgatctcccgtcagcgcttcttcggcgtcccgttcccgctgtggtacccggtgaacgcttccggcgagccggattacgatcacccgatcactccgtccgaggatcgtctgccgatcgacccgaccatcgacgtgccggagggctacgacgagtcccagcgtgatgtgcccggtggtttcaccgccgaaaaggacatcatggacacctgggccacctcttcgctgaccccgcagatcgtgacccactgggccgagccggacgaggcctccaaggccctgttcgcttccaccttcccgatggacctgcgcccgcagggtcaggacatcatccgcacctggctgttctcgactgtggaccgcgcgcacttggagaacaagtgcctgccgtgggcccatgccacgctgtccggctggattctggaccccgaccacaagaagatgtcgaagtccaagggcaacgtcgtggtgccgaacgagccgatcgagaagttcggcgcggacgccgtgcgttactgggccgccgccgctcgcctaggcctcgatgccacgtacgacatcggccagatgaagattggccgtcgactggccatcaagctgctgaacgccaccaagttcgcgctggccatcggccgtgaggacgagaaccatcacgtgggcgctgccgccgaggccgcgtggaacccggccgatgtgaccgaaccgctggatcgcgccgctatggccaagctggctttggtggtgcgtcaggccaccgaggcgctggaatcctacgagcattccaaggcgctggaagtcatcgagtcctacttctggcagttctgcgacgactacatcgagctggtcaagaaccgcgcctatggcactccggacgagcacggcaatgtgccgtccgagaaggctgtgaagtccgcccgcaccgctctgggtctgggcctggacgccttcgcacgtctgctggccccgtacctgccgtacgccaccgaggaagtgtggagctggatgcacgccggttccggttccgtgcatcgcgccgcctggccggtcgtggacccgtatgtcgaggccgccaccggtgcttcccccgagctgctgacttgggccggcaaggccgtggagcagctgcgtaagatcaagtccgaggccaaggtctccatgaagaccccaatcctgtctgtggcactgtccgctgcttcggaaggcgtggaagcgattcacgccgccttgggcgatatcgcgcaggccggtcgcgtggtcggcaagttcgacttggtggccaagcacgccgaggaatccgccgccgaaggcacgcccgaaaccgaggtcgccgtcgaagccagcgagctcggtgagccgccagctaagaagccaaagcactgaacgttacgcacaacaacagtaggtctcacggcaatgccgctcgttccgagcctacgggaagcccaccgggcttcccgcttaacggctcggccagctaagaagccaaagcactgaacgttacgcacaacaacaaaagaggggaacctattgaggttcccctcttttgttttttgacgttcggatgacacgactgtgggacggcacgcaaatatcccgcatacaccatcacaccgtcggaatcacgatgagatatcgggtttcggcggttttttgttgcgtattggggctgtcgagctgcgcgacggcctgcgccaagagcgtgccagcatcactgattttcacggtctcattaatcagcgcgttcatatcgtgcttgaacagcgtgccgccagtgccaaagccgaacagtactggagcggtgtcaagattgttgccggaatcgctggcgtcggaggccttgccgttgccggaatcgccagtgtcgctcgacttggctgagtcgttcgttcccgaaccagcgctcttagacgagtcggacttatcaccaccaccgatggccgaagtaagaccacccgcatagttcatcacatcgccagcagacatggacatggtgtcatcgaccagtgaggccttggaatgctgcgactgctgctgttgcgcggctttggcctgcttacgggcggcatcggccttacgcttggcttgggcgacccgggtcttgccgtagaacgattgcgattgcgaatcgaccaggccggtcagtgcctgagcctcggtcaccggatcggaagagacatcaccggacgaaccatcaccatcactgccggaagccgaggacgcgccgccttcgaactgatcggagaatcgcaatacaatctggcgcaaggccgtggctttgcccgtatgctcggaggcggtggcaagcgtgctcatcgcggcatcgaccttggattgagcgtcggcgagttcatcgctaccgttggtttcggcgatggcttggctctcgtaagcggtggcgcccgaggacgtgccgccggtcagggcgctcaaattggccgtgtaaacgtccgtgtatttcatcgaatacggaatcattgcggcggagagctggctctggccatcggcgtattgcttggagccttgagtggcttcctccgaagcctcggcgatcagatcatccaccagtccggtggtgccttgctgctggatgcggcgaatcacctcgtccaacgcatcgaccgcaccggcatgctgatgtgcggcactgacgttgttcaccgcgttggccaagtcgagtacggcttgagccaaaggcgtgtccccggacagttcgccggccgtgcccatcaacgccggcaactgggtggaggtgccaatcgatccagacaggtgcgtggtatatgagcccacatacgcggccatatagtcttcaaacgtccgcttatgggcggtttcgcgttcggccactacagacttgttcagcgcacgttcgttatcgcgcagggtttgaagctgctcgatgagctgttgctgttcaccagaaccggcgtcggtcagtgaatcgaccagtgtggcggcagaggcggtgagttgggcgacatccgtatcggcagcaggctgtgcggcagcattcgcagcattcgcggcatcgggattagcaccaactgccggactgctggaattggaaggcaatacggcgagcgccacggaactcatggagaagtctttggcgttcatatagcagctgaattccaagccggttgcggcttttccagctgcggcgactacggcattggaaccttgcgtggtcaccgtaatggagttgtcagcggaaacatcatcggctacctgcgtaggcacggtaaaggcgacaaccgggatcgtacggttggcttccttggtttgcggcttaatatcgatatacacgccgatcagtccagacgcgccggcaacctcgtttgcctcgacgttcggaccgtcaagcgagtaggtgacgctgactttccatggcagggtggcggcggaagcggggatacgagaaaccttggacgtgccggaatcggcactggcgccattgccggcgccgcccttccctaccacataccaacggaccggctccccttcggcatcggtgacggcgtacatatcacttgccgtagcgagcaccggaccgtaatcaaccggagtcggacgagacatccaagcaccgccgagaatcgaagccacgcacaatgcgcaactgaccagtgcggcaccacatctcatctacgtatcccattcatacagtcgaccactacgggcattccattcccgtattaatgtagtcgctgcaggcaacttgccctatagacgaatatccgaaaggtgcccattcgctgcgggcgaatcaggcgaatacgtcgagtacgcccgggtcaccaccggcatcggctatgcgctggtggcgcttcttggcttcggtaaccacgaattcacggtacatttcggcaatttccggatcaagcccggcatcgatggcgatgcggtggaggcgttcgatctgatagtcctcacgcttggtgtcttcgggcgcgaatccggcgttggctttgagcacgccgacctgcgaggtggccttgaaccgctcggccagtaatgcgatgaccgccgaatcgatgttatcgatggtttggcgcagcgctttgatgcgcgccaccgcttgtgcggtttccgggtgggccgccgcctgggcggagtcgatggtggtcctttgccagtcgctgctcgtttcgctcatagattcgaggatactcccgattacggctttgcacgatgcgcaaagtcagatatctcagatgtcatagtcgccggtgaggatatggctggcatccgcatcgccgaacatggccgcaccactgcccactcccaaaacaatcgaacccagtgatgcctctttcatctcatatatcgtcagcgtgcatgtgaacgttgacggcaatactacaactgcaatgtgatagttgatgtatttgcatcagatacgacaagggctgcaccccgtatcaatcagggtgcagcccttacactattgttcagcggtctgatcagttgccgttgaccgcgttgccggtgttggcctgctgcacgatggcggcgaggaagtcgcggttggtggcggtcttcttgaggcgcggcaccagcgtctggtaggcctgctcgggctccatgccgcccagcagtcgacgcagacggtagataatcggcagttcctgcgggttggtgatgagctcctcgcggcgggtgccggaagcgttgatgtcgatggccgggaacagtcgcttgtccgccagctcgcgggacaggcgcagttccatgttgccggtgcccttgaactcctcgaaaatcacctcgtccatcttggagccggtttccaccagcgcagatgagatgatggtcagggagccgccgttttcgatgttgcgggccgcaccgaagaacttcttcggcgggtagagggcctgcgcgtccacaccaccggacaggatgcggccggaggcaggggctgcgatgttgtaagcacgagccagtcgggtcatggaatcgagcagtacgaccacgtcctggccgagctccacaagacgcttggcgcgttcgacggccagttcggcaaccgtagtgtgatcggaggccggacggtcgaaggtggaggaaatgacctcgccctggaccgtgcgctccatatcggtgacctcttcgggtcgctcgtccacgagcaccaccataaggtggacctcggggttgttggcggcgatggagttggcgatgttctgcagggtgatggtcttaccggccttcggcggggagacaatcaggccacgctggcccttgccgattggggaaacgatgtccatgatacggccggtgagcttgttcggggcggtctcctgcttcaaacgctcctgcgggtacagcggcgtgagcttggagaactgcggacggttgagcgcttcttcaacgctttggccgttgatggaatcgatggcctgcagcggcacgaacttctggcgctggttgcggcggtcgccttcacgcggggcgcgaatcgaaccatgcacggcatcgcccttgcgcaggccgtacttcttgacctggcccatggaaacgtacacgtcgttcgggccgggcaggtagccggaagtgcgcacaaaagcgtaggagtcgagcacgtcgacgatgccggccaccggcaccagatcctcctgcggctcttcgcggcggctatcacggtcattgcgatcgctacgattatcgcgatcatcatagcgacgatcatcatcggcgttgtcgcgatcacggccacgcatgcgacggttacggcgatcgctgcgatcattacgggtatcgcgatcgttgcgatcgctacggtcgcggcggttacgacgcacgaactcgtgatcgtcgttctgctcgccgtcttcggacgtttcctcgtgcttctgcgtgggcagcgtggccaggatatcgtcgaggtcacgcacggtttcttcgctgttttccgcagtgcgacgacggcggcgaggctgctcgtcctcatcatcacggactcggcgaatcagcggaacttccacgtcctcgtgacgctcgcggcgacgctcggtaggcgctgcatctcccaaatcgagcgtggccagcagatcgccggcctcatcggccttcttgcgcggcttgcggcgagcgaaatcgggctggtcgtcatcgcgacgacggcgggccgcacgcggttcggatgcggcatcatcggcggccttacgacgggtgcgtcgcggttcggtctcgtccttcttggcatcgtcggccacgggaagcggcaaatcgagctgcggttccgtggcagccggagccggagccggcgactgggtggccacgtcagcattgtctgtggtgttggcctcagcggcatcggactgcggagccttgacgaccttggcggttttggcggccttgggggcgcgcacggtcacaccggccggcggctctccaccattgcgcgccgcctgcagggtggcgagcagctcgggcttgcgcatggtcgacgtgccgcgcaggcccatctgtttagcgagctctttgagctcaggcagcttcatatcctcaagattctggctatttgccactggttgccctttccataccgaacagacccatgcctatccaggcgttaagagtgattattgcggttgcaccgctcatgaatgttcgctgcgtctctgagtctctgcgaacttcgttcactgtacaacgccaactcgaccaacgcaaaacggcccgccgaaaaccaaaaaagctccctctgtgacgagggagctcaacaaggtttattcacttttcttcgtggtaggacttttcggtgttgacggaccacacgttcttcttggacgtcttgccggtcttgatgttgccgacggcctccatggcggtggccatggagtggtccatgttgttgtagcggtgctggccgttacggcccacgcagtacaggttgccgaagccgtcgaggtactcgatgagctcgtccatgtgctcataggtgtcgaagtaggcggggtacgccttcctgacgcgctcacgatgggagtcgatgacctcgtccggaccgttgatcacacgcatgcgggtgagctcggaaatcgcgaacttggtgacatcctcctcgctcatgttccagaacgagtcgccctcctcgcagaagtactcgagaccgatccacacggtgtcgtccacgtccttgaccaggtacgggctccagttgttgaagatctgcagacgtccgaccttgtagcccgggtcctgcacgtagatccagcagtccggcacgatcggcggattgccgagggtggggatgctggtggtgttcttgagcttcaggtgcttgaccagcaggcccacggtcacgaaatcgcggtacggcaggccgttggccacctcggtcatatcggccggggcgggcttggaatcaacggcctcgggatcggcgccggccgcgtcgatggcgttgaccaggtccttgaccggcatcgaggagatgaactggtcgccggaaagctcggtgcggttgccctcggaatcctcgtacaccacggaagacacggcaccatcggtctggcggacctcgaccaccctggcgtcggtcagcaccttgacgccggcggcctcgcaattggactcgacggtctcccacagctggccgggaccgtacttcggataccagaactcctcgatcagcgaggtctcgacctccgcgttggagcgcttcttgggcagcagcttctggaaggcgttcttgagcacgcccatgatggacaggcccttgacgcgctgggcgccccagtcggcggagatctgggaggggtggcggccccacagcttctccgtgtagccctcgaagaacatcgaatacagcttgcggccgaaacggttgatgtagaagttctccagattgtcttccggcagcttgtggaacatggacttcaggtagctgaagccggccaccatggtgagcttgaagcccatggccttcaacgtgttggggctcagcgaaatcgggtaatcgaagaagtggcggttccagaagatacgggacactcggtggcgcttgagcatcaccttgtcctccgtctccggatcggggccgcccggctccatgtcgtggtcgcggccgagcttcttgtcatcataggagggtgcgccctgcaacggcagaacggtcttccaccaatccatgatgcgttcgtctttggagaagaaacggtggccgccgatatccatgcggttgccgttgtgcttcacggtgcgcgagataccgccgaattcgcgggtcccctccagcacggtcacgtcgtacttgtcggcaccgccgtccttgatgagttcccatgcggcggtaagtccagccggaccgccgccgataatcactacggattgcttgtcggtcattatgctccttataaacgcaaaatcagagacagtctactagaagccccggaatcgcacaccgaaagatgagcgaatgcttacagaattctcccgatatacgaccgatgcgccgtctttccatcagcagaaaggcgacgcatcgaatcgtgaggtaggggtattcggcaacgttgcgtcacacacagcgcggcgaatcggtttggtcttaggctaattcgtcagcgacgaactttccatagattcagcgagatgcctgcaagtgcaagcagcatcataatccccgcaacaccagtaacggcaacaccagtacgactcaactcgttttccgtaccattagcctgagtgttgctgggctgatgagttcccgcaccattgttattcggagtggtactcgttccttcaccagtgttaggtcctgtgcccggctgcgttgtggaatcatcagtcagatgcgcatcgtcgcctagggtttggtggtcggaggccaagcaacttttaagctcagtgagcttgtaccacgtggaaccatcggcaatcggcgtgcattcggagcggaaggcgatttcctgctcgttgtagagcatacgaacgagcggcgtgtaggcacggccggtcttcgggtcgttgccggatttgacggcaacatcccactgcacattagcggccatcggagtcaccgattcaccgcgccattcattgttggcgtaggtgtacacgtcggtggtgctggcggccgcctgctgggtggaaccgggaaggccaagcagcgcggcgaacggcatcatcgtttcggcatgggcaaagcggaaagtagcaacggtggatccgccgtttacgcgctcatcaatcgacgagaagaaatcgtcaagcagcggctgtgcgattgtgtaggtctcgtcttggccggcgtagctcgggcccttctcgtagaagtcctcggcgtcaagcgcccaggcgaacaacttggcgtcgtctgcctgctcaccttggaagtactggttgaagtcgaaggtatggctgccggtgttctcgttctccatatcagcggcgatgatgtacaggttgtacagatccatcgcggcatcgtattcggaggcgatcttcttcttggctgcgccgcaggcgtcggcatccttgctggggtcggctcccggcgcgcagttggcctcgccgcccttggtgccatcgacagtgttgtaccaggcgtacgtgccgtcggccagtttggcgaggaagtcatcggtgaagatttgtgaaagcaaatcgtgagaggctgttttcacgtcctcgttttcggcgatggtttgctcagcgcctgcgataatcgcatcgttttccacgaagttctggtaatcgtcggcacgctgcttggcctcaccggttttctcagtgccgtccgggttttcggacttgtggaagtacagcgtgttcggcgtcttgtcgaaagccgccgcctcgccggtgccggccggatcggcgggcgtcacagtgctgttcgccagtttattgttcgaggccgcgttgaaaccgcgagcaaaattctcgcctgattcagtagcgcgggcttcgccagaggactgataggcaatcttgccaccgtccttggctgcgttgtcgaacagcgtcttgttgcgctcgtaggcacgtgcgccaatgccctgatgttggtcagcaccctgaccggtgagcataccgtagccattctccacatttgcggcggtgatggctttgagattcttcatgaattcggacttgatggcatcagacttaaaaccgttatccgcttcggcggcttcggccatcttcataagcaatgcgtcgtatttgtagctggacaggccgcgtgaaccgtggcgagccatcgactcggtgtataccgtttcgtagccttccggcgcctggctatagctggcagtggtcgcttcgctaggtgccacatatggctgcttgctgctgtaatactggccatcggcctccaaagccatggcgtgcggaacggtcaggatgccaccggccagcaatgtggcggcagcaaccacgcccgcgatggagcccttaaggccctgctgcatatggtgtgtgttcatgcagcattttctatcagccgcaagcaaacaagacacacgatggcaaggttacgagtctgaacttttgctatgcgttgtatgaacaatgcgcgacgccccgccgtaagatgacggaatgccgcgcattgtcaatacaggctgtatcagacgattgcctgtcagtgaatatcgtcgggaatgtcgatatcggttttctggacttcttcgacgttcacgtccttgaaggtcacgatgcgcacggacttgacgaaacggctggaacggtagacatcccatacccatgcgtcagtcagctgcacatcgaaatacacgtcctgaccagcggaacgcacgttgaaatcgaccttattcgccaagtagaagcgacgctcagtctccaccacataggtgaacagcttgatgacgtcacggtattccctatacagcgcgagttcggcgtcggtttcgtaattgtcgagatcctcggcactcatgcttgtttactcactcactttccgtatcgcgtttgcggccgcggcccagcgtacgccaccatgcttcctttgagggcttgcgttctgcctgaccgtacggccagttactttcctcttcgagactgtggcgcgtgttcttctgcgtatcgtcgtggtgctcggcctgtggctcgactggctgtgcggccgccggcgtctgggcctgggactgcacgtcactcgtcgtggcgccggctgcctcaccacgctgtgccggctcgggttccggcttgttctgctggatggcgatggaatgctcgcgcgcggacagcgcttccttgacacccgggttgtcctcaatcaagtgcatgccaaaagcgtcaagcgaacgaatcggatcgtactcgtcagccaacgtgtccatgacgataaggtcctggtatttgttgttttcggcatcccacaacgcgtcgcgcgaggtgccggacggcacgaagccgagcgactggtagaccgaaatcgagcggctgttcttttccggcacgctcacccagatgcggtgcatgcccaagccggccggttcgggcgcgaaaccgtaggtcatcacacgcggcatggcgtcacgggagtagccgcggccacggtattcacggcccaagatgatctggatgcgggcggacttggaccagccgtcgatgtcgataaggaaaatcatgccgatgacattatcggtgctggccgcatcgagctgaccgtcatcgtcatggtcggcgtcagtcaatacggcccatgcgatggtgcggcgggattccggatcacccacaccggattcggcgggtgcctgaccggcttcccaagcctgggagcggcggacccacgtgtgtacgatggcgcgttcggtgaccgcatccttacctgtgatcttggatgcgccatagaaggcatcaagttcatccaaacgaggcaggtcctcgacggtggcggggcgcaggtgcaccatttcgccacggattggcggaatgacgatgctctgtggcagatcgcgcttcagttgcgcttcggtagccatgctcagcgtctcgttggttgcggtcatcggtatacatcccccggttcggcttgtttcggctcacggtccagtgccgaacatatcttactcgactgggtgaacgctggaaatgctctgagtcgactttcttacagaatcaataaaggctcccgctggcgggagctgtctaacggatttgaactggagaatttccctacaaataagtgctcccgctggcgggagctgtccgcgaagcggactgagggtggtcatccgtacatggcgaccaccctcagtctcactccgttcgacagctcctgccagcgggagccagtgaatctaatcagcccttgatcttgcccatgacgaccttggtgacggccttggcgtcggcctgaccgcgcgtggccttcatcacggcaccgatgattacacccatcggcttcatgttgccgctcttgagcttctcgacaacgtccgggttggcttcgaacgccgcgtcgacggccgcctcgatggcaccgttgtcttcgacgatcttgtagtcgtgcttcttgacgacttcatccggagtgccttcgcccttaagcacgccttcgacggtctgcttggcgagcttgtcgttgagcttgccggaggcgatgagcttctcgacctcggccacatcggccggggtgatcggcagctcttcgagggacacacccttggcgttggcttcgcgggaaagctcgcccagccaccacttgcgggcaccggcagccttggcaccggccttgacggtttcctcaatcaggtcgagggcgtcggcgttgaggatgtcgcgcatctgcagatcactcaggccccactcggacttgaggcggttgcggcgctcgcgcggcatttccggcatctgggccttcatctcctcgatgtgctccttggtgatgtggagcatgacgaggtcggggtccgggaagtagcggtagtcgtcggcatcggacttcagacggccgccagcggtggtctgcgtagcctcatcccagtggcgggtctcctgcagaatctccttgccgtcgtccagacgagcggcctgacggcgaatctcgtactggatggtcttctcgatgccgcggaacgagttcacattcttggtctcggaacgggtgccgtacggagcgtccgggctcgggcgcaacgagacgttcacgtcagcgcgcatgttgccctgctccatacgagcgtgggagatgttcaacgcgcgcacgatgtcgcggatggcgcgcacataggcaccggcgatttcgggagcgcggtcgcccgcaccctcgatcggcttggtgacgatctcaatcagcggcacaccggcacggttgtagtcgaccagcgagtggtcggcgccttcgatacggccgtcggcgccacccacgtgggtgttcttgccggcgtcgtcctcgatgtgcgcgcgctcgatcggcacgcggaacacggtgccgtcttccagctcgacgtccaggtagccgttgccgttggtgggcttgtcgtactgcgagatctggtagtcgcgcggcatgtccgggtagaagtagttcttacgggcgaactggctccactcggcgatttcgcagtgcagggccagacccagcttgatggcgtaatcgacggcggtcttgttgatcaccggcagagagcccggcaggccaaggctcaccggggtcagctcggtgttcggctcgccaccgaactcgatgtgggccgggcagaacagcttggtgttcgtggacagctccacgtgggtttccagaccgaagaccacatcgtacttcttggtggcatcggcgtacttcatcagtttttcagccatgatgttgtttctttccttccgatgctcacttgcccagaccgtcaagccacggggtcttgaggtcgttccagatcgggccgttccagctgtcttccagcgcggcttcgagggccgcggccggcttgtacatgacttcgtcgcgctgctgcggggcgatgaactggaagccgacgggcaggccgtcgtcggacaggccggccgggatggacatggcaggcacgccggcgaggttggccggaatggtggcgatgtcgttcatgtacatggccagcgggtcgtccatcttctcgccgaacttgaaggcggtggacgggctggtgggggccacgagcacgtcgacctgttcgaaggccttcttgaagtcttcgataatcagcgtgcggaccttctgggccgagccgtaccaggcgtcgtagtagccggcggacagggcgtaggtgccgaggatgatacggcgcttgacctcgtcgccgaagccggcttcacgggtgtaggccatcatgttggcggcggtctgcggcacgccggtcggcggcatcacgcgcaggccgtagcgcatgccatcgtaacgggccaggttggagctgacctcggacggcatgatgatgtagtaagcgcctagcgagtagccgatgtgcgggaccgagacctcaacgacctcggcacccatctccttgagcttgtcgacggcctcgttgaagcgggcctcgacgccgggctggaagccgtcgccgccgagttccttgatgaggccgaccttcatacccttcagatcgcgcttggcgccttcgcgggcggcggcgaccatcgggcgcgggccttcggggatggaggtggagtcacgcttgtcgtggccaccgatgatctcctgcagcagtgcggagtcgagcacggtgcgggagaccgggccgatctggtcgagcgaggaggccatggcgatggctccgaaacgggagacgccgccgtaggtgggtttgacgcccacggtgccggtcagggcgccgggctggcgaatcgagccaccagtgtcggtgccgagggcgatcggtgcctcgaatgcggcgactgcggaggcggagccaccaccggaaccgccgggcacgcgctcggtatcccacgggttgtgggtggtctggtaggcggagtgctcggtggaggagccctgggcgaattcgtcgaggttggtcttgccgagaatcggcatgccggcggccttgagcttttcgatgacggtggcgtcgtacggcggcacccagccttcgaggatcttggaggcggcggtggtttcgatgcccttggtgacgatcatgtccttgatggcgatcggcacaccagccagctcaggcagggcggccttgtcttcggcggacttggcgtcgaaggcgtcggcctgctcgagagccacatcgccggaaaccttcaggaaggccttgatggacggctcggcagcctcgatcaccttgaggtgggcttcgacgagctcgcgagaggtgacgtcgcccttcttgacggcagcggcctgctcggcagcagacagtttgacgagagttgcggtttcgttgctcatcgattactcctcgcttcccaggattcgcggtgccacgaacatgccggcctcggtcttcgggccaccggcgagcgcctcttcctgcgtgagcggggtttcggcgacgtccgggcgcaggtaggcttccagcggaaccgggttggcggtcggcggcacatcgtcggaggcgacttcctggaccttgttgatggagtctgcgatgacgttcagttcgccctgcagacgggtgatttcctcatcggtgagcgcgattcgggccagatcgcccaaatgcacgatttcttcgcgtgaaaatgttggcatggccataactatatgagccgtatgtgacacgcagttgtcgggaaaccgcattttcctaccctttgagaccatttcagcagggcaggcactcgggtcattatttgatatccgcttttctggtgacgatgagaccgccgatccatgcggcaggattgtcggcgcatggctacacgcctgatacggcgtgttgggcaatccatgcgtgcatggccacggccgccgcagcgcctgcattaatggagcgcacggaaccgaattgagagatgtagaccacatcgtcggccaatgcgagggccttctcgctcaatccggggccttctgcaccgaagagcagcaggcaccgcttggggaaggcataggcttccatcggcactgcgccgggaataatgtcgagggcgatgacgcgggcggcttgaagctccttgatgcgtgcatcacaagcatcgatttcggccagcagctcatgaaggtgcttgttgtctccatccacagccacatcatgcgcatggatggcggcggcaccggccttggctcgttcataggcgatttcaccggcgatgcgatgatgccagctttccaccagttcggcgatggaggggtggtgttcgacgtgctggtacagttcggtcatcaacgcgcccttgcgattccacttatgtggaccgacaatgtgtacgcgcttggcctggaaggcattagcggtgcggaccatggaaccgatgttaaaatcgtgggtccagttttccaccgcaacttcgaagtcgtgacgccctcgagcgtcaagatcggccttaatggcagcaacggtccagtagcggtaacggtccaatacgttgcggcggtctccgtcgttcaacagcaccgagtcgaaacgaccgtcataattcgaagaagtcggatcatcgggacgaggctcaccgggatgggtctcagaccacggcccaaggccgatttcacggaattccggttcacctgaagccttggcagccaaagaaatctggttgggtgcgtgcaatctttctcctcgataacgctattcaccggttcctcttagtcagcttcgctgctcagcccggctgactttatgcgagagacgtcaaaggtggatttaccgcagttcggattcgtcgaagacctggatgaaggggagcgtttgctcgtcgccggtggaggggttgaccacattgatgtctttggcaccgccaccgaccagcgaggcgatggccacgaccttggcacccagctgctccactatgccaaagtcgaggctcagctcattgccgttgcgcagggtgaccagcgagctggtctgcacgtacgacttttcggacagccaagcatccaacagcaccacacggcggccttcgatggaggggcccttgatggacgggtagacgaagtccatcacgaatccatctaggtcctcgccacgagaggcggcggcctggatcatggcagacaccatgggcacagatgctgcggtcaaggcaccaacagcatcgaagtcatcaatcgaatagcccgcatcttccaaagcgtcaatcagtacatggcccatgacagtggcggcacggtggtcgaaagtcaccgcggcaagttcggagaacggacggcccaccacatgctccttcagcaaggtggctagctgttcacgcggctccagcatggcaaagtcattatggctcttcgcgacggcaaggtccggggtaccagtggggcggaatccagattcagtcatgactccagactatcgcctgaggcagtcagatgagtatcaccttcatcggccggcaccacttcaggggcggacagttcgctcacattgcctttatctgattcgatgatcggtacttcctcgatgatcttggtcggttcgattttttgcagcttgcgagcggtgggcaacacacggcgttccaaactggacgcgaacttgttgtaggcgctgaccgtcttagtaatctgggtgcccaatttgatggcataatcacccagcgtggagaaccgttcgtacagttctcgggacaaatcgaacagctgcttggcgtcatcggtgagcgactgctgctgccaggcataggccacggatttcagcacggcccagagcgtgaccggcgaggtgagcgccactttgcgagagaacgcatcatccatcagtgtgggatcggcttcgagcgcggcctgcagtagtgcctcattggggatgaaggccaccacaaaatcaggtgctacatcaaaggcattccaataggccttttcgccgagagcacgtacatgctcgcgcaacgccttggcatgggaccgcagcaaatcatcgcggcgggcaatatcctcggggctggcggtgtccgggatttcgcaggcacgctggtaatcggcataaggcactttggcatcaatcggaatggtcttgcctcccggcagatgcacgatcatatccgggcgcaacgtacgcccatcggcatccgtgaccaccacctgggtgtcgaaatcgacatgttccagcaatccggcggactcgacaatgttcttgagctgggcctcgccccacgcgccacgcaccttgttgttgcgcaacgcggcggacaaggaactggtttccttgtccaaacgggcctgctgatcgttgagccccttgagttgggctcccaatgcgcccatttccctcttgcggccctcttcgatctgcgtgaccttgttctgcaaggtatcaagattcttggccactggcgcaagcgcctcgagcaccttgctctgttctttcaaacgtgcttcctgttcagcacgcttggcctcggcggcctgagcatccgcctgacgcttccgttctgcctccgcagctgcacgctcacgttcctgctgaatgcgaatctgctcagcctgctgcgcctgggcaagttgtgacttggcgaaagccaattgctggttcacgccttcaatctgagcctgtgcggcagcattgcgagcactgagctcagcgttctcgaatcgcgcattctccagcgaggtcttggcctcttccagctcctcgcttttgacgcctcgagccatctcctgacccttatgacggcctagcacgaagccggcgaagaggccaagccctgcaccaaccactagcacgacgatgacgataatcacggttcctatttgctcaaacatggtacccagtatgtcatcgatggtgaatgacggtaaaactcgtcacgatttgacgagacgcgcaatggccgcggaagcctccgcaagtttttcatcggccacctcgccgccctgaatcgacgcctgccgcacgcaatggttgagatgatcgtccagcagcaataacgccacggatttcagcgccgaattcgacgccgaaatctgcgtcaggatatcgatgcagtatttgtcatcctccaccatctgcgtgatggcacgcacctgtccttcgatacggcgcaatcgtgcgatgaccttggccttgtcttcgtcataaccatgcatcgcaaaccccctgatacttatccgtcagctgaacacaccccattatataccctctaggggtatagggtatacactgttgttcagtacaacaaacaaggggaaggaacggttatggagctcagcatcttctcggccgccacggcgctgatagcggcggccgcattgacatggctggtactgcggttcttcttcggaacgcagaaagccacggccggggccatggacgcctccggcgaacgccaatccgcaacaatcaccgtcaagggcgggtactcccccgccgtgatcagcatgcgcacgggtacgccgatcacgctgactttcgatcgacaggagaccggcgaatgcacttcgcatgtggtgttcgcggatctggggcttgacgccatgctgccgggcaacgccaccaccgacgtggaactaccggcgttgccggcgggcgaatatccgtttgcatgcggcatgaatatggtgcatgggttgttgagggttgagggagaggagagtaaggacggtgcggataaggacgggcttcgcccgcgtgctgacggctcggccgaagccgagggggtctctccctcagacttgcgggttggagctccggttgtggatgcggcggaggccgagcggcgagaggcggctgaacgcgccaatgagatcaaggcgctgacgaagctggtgattgtgggcgcggtactgacgttgccggtattcgccgtcaccatgctgcatatggccaatcccgcgctggcgccgcattggatggtgaacccgtggctgcaggccattctcatcacgccggtgatgttctactgcgggcgtccgatccacacggtcggcttccccgcgctggcgcaccgctcccccgacatgaactcgctggtctcgctgggcacttcggccgcctacctgtattcgctggtgacctgcatcgccccgtgggtgttcccggagggctcgcgcgagccgtatttcgaatcggtgggcgtggtcatcaccctggtgctggtcggccgcctgctggagaccaaggcccgcgaaggcaccggcaaggcggtgcagtcgcttatcaaactgcgcccgcgcaccgcgcacaagctcaacgccacttccgcagacaatgtggacggcatcgaatggcgtaatccggcgcatttcacggacaccgacatcgacgccatcgccaccggcgacctgctggtcgtcaagaacggcgagcgcgtgcccacggacggcgtgatcgtggccggcgaggcgcgtatcgacgaatcgatgatcaccggcgaatccaagccggtctccaaaaccgcaggcgacccggtgaccggggccaccgtgctgctcaagggcggctgcgtgatgcgcgccacccaagtcggcgcggacacggtactctcgcagatcgcggcgatggtggcccgcgcccaggcgaccaaggcgccggtgcagcagctggccgataagatcgcccggtatttcgtgccggcggtgatgatcatcgccatctggacgttcgccatctggaggtcactgggcccggcgccgcaactggcgcacgcgctggtcaccgcggtcagtgtgctgatcatcgcctgcccgtgcgcgctgggactggccacgccgctgtcggtgacggtctcgctgggcttgggcgccaccaacggcgtgctggtcaccagtgccaaggcgctggaacaggcgcgtcgcatcggcaccgtggtgttcgacaagaccggcaccatcacgcgcggcgtggtggacgcggccgccgactgggacaagccgagctacgagcaggacacggtcaaggaaggctcgcgcgaggccatcgcggcgttgcgcgcacgcggcatccgcacggtgatgctgtcgggcgacaaggccgaggtagccgggcgcatcgcccgcgaagtcggcatcgatacggtgatctgcgaggtcaagccggacggcaaggcctactggatcgccaaactgcagcgcgaacgcgacgaggccgccgccaaatccgcgtacggcacctcccgcacggccgcacaatcccgcactctgattgcgatggtgggcgacggcatcaacgacgcccccgcgctggctcaggcggatctcggcatcgccatcggcaccggcacggacgtggcgatgcagtcggcggacgtgaccttgatgagcggcgacttgcgcggcgtcatcaagaccatcaacctgtccaatgccacgatgcgcaacatccgcgagaatctggggtgggcgttcggctacaacgtcatcggcattccggtggccgccggcgtactctacccgttcaccggctggctgttgagcccgatgatcgcgggtctggcgatggcgttgagctcagtgtgcctggtgctgaacgcgaaccggctgcatggagcgaacatcaacgtgggtgctgccgatggtcccgccggttcgggcagcagcacggcggatgtcgaatcagccggatcggccgaatccgccaacgccgccaacatcaccggctccgccacatccaacgcgcctcacgagccgaccgtcatcatcgacgatcgcaccacgctgaatcaaaccaatcacgtatctgaccaatccaataatccaaccaacaaggagaacactatggatacgggaatgcacatgcaccacaccgcccccgcggacggcgaaaccgccaccgacccggtgtgcggcatgaccgtggctgtgaacgccgatgcgatcacgcgcgagtatgagggcaagtcctattacttctgcggcgaacactgtgccacgaacttcatgaaggccccgcaggtgttcctggagcagtagtctctgcgtttacctgattcaacgacaatggcctccgcccaaaacgagcggaggccatttgcatatatgaatcaatcaacgaatcagctggcgaagaagaacacgaacagccaagcgccgataatggcgccgacaatcggggccacaaccgggatccaggcctcgccccagcgggaggagcccttgtgcgggatcggcaggatggcgtgcagcagacgcggcatgaggtcgcgggccgggttcaggccagggccggtcgggccacccatggaggtcacgaggccccacacaatgaagccgacgacgatggaggcggcggcgtaatcctgcttgccccaagccagggacaggcagcacagggcgccgaagacgagcaccagggtgccgaacatctcgttgaggaagtagttgaccttctggttgtccgcgtcagtggtgcagaaggtgcccagaatcgcctcggcgtcctcggtctccttgtagtgcgggtagtaagtgatgtagacgatgagctggccgagcagggcgccgagcagctgggcgacgatgtacggcagcacgtcgctccacgggaacaggccgttgacggcctgggcgatggtcatggccgggttgatgtgcgcgccggagacgctaccgaacatgagcaccgggaacatgacgccgaagccgtagcccatggcgatgttcagccagccggcgtggtggcccttggtgttcttgagctcaacgttggccacggagccattgccgaagatcatcagaatggcggtgccgaagaactcggcggccagcttggtaaagagaggataatccactgcttcttcttttctcttcgccgcgcaacaggcatggctgactgttcacggcattctgtgtgactggaaatccgttcgcggagccggcgacgcgatttacgctgggcgcgaaagcaaacgtggtgattgtacactttgccccacgacgaaatgccggcaagatgcgatgtcgaatgtccagccgaatgcaatgcccaaaaagccatcggaatcagccgaagcgaccttgaatctcagtggttgcgaatgacgttgcgcagaggcaggacgctggtgggcgagacggacagttcgtcgattcctaggcgcaggaacgtatcggtcaggctcaagtctgcgccaagctcgccgcagatgccgcaccagatgccatgacgatgggcagcctcgatagtcatctggatcatgcgcagcacagctggtgaatgcgggtcggcaaagcgttcgagactcgggttctgacggtcacaggccagcgtgtactgggtcaggtcgttggtgccgatggagaagaaatcgacttcggcggccagctcgtcggccataatgaccgacgcaggcgtctcaatcataacgccgatctggatactctcgttgaagtcgatgcgctcgccgcgcagctcgcttttggcttcttcaagaatccgcttggcgtcgcgtacctcctgcacagaggtgatcatgggcagcataatggcgatgttgccgtatgctgaggcgcgcaataatgcgcgtaactggactttgaaaatctccgggcgggtcaggcagatgcggattgcccggtaaccaagcgcgggattatcctcgtggctcagattgaagtagtcgacctgtttgtccgcgccgatgtcgagcgtacggatgatgaccggacggtcgcccatctcctgtgcgacttgtccgtatgcatcgaactgaaattcctcggtcggccagtcctcgcgttccagatacaggaactcactgcggaacaagccgatgccctcagcatcgttggccagcacggcggctgcgtcagagggacggctgatgttggcgtacaggtggacccgctgaccggacttggtttcggtgggcttgcccttgagcttccgcaggaggcttaggtgctcctcagcctcggccttcctgcgccggtattcggtcagcgtggcctcgtccgggtcgacgaataccgcaccgctggtgccgtcgattacggcaacgtgaccatcatcggccgggtcaaaggcgtcgccgatacctgtgatggcgggcaggcccatcgtgcgcgccagaatcgcggtgtgcgagttcgctgagcccttggcggtcacgaggcccaaaaccttagcgcggtcgagctgcgcggtatcgctgggagcaagatcttcggcgaagatgatgtggctttcgccgttctgcgcgatcccgttctgcacaataccgttctgcacagcatcgccttgtacactgccatcctgcgccgtgctatcgcgtttgccttgcagcacgttcatcacgcggcgagaaacatccttgacatcagcggctcgagcctgcatggtcgagctatccatcgcagcgaacatggcggcgaactgttcggcggcgctcttcaccgcgaattcggcgttcaccttgtcttgcgcaatcaaaccttcgacgcattccgcatagtccgggtcctggagcataagccgatgggcgtcgaacagttcggccttgttttcgccgaactcagcggcgacgttgtcacgcagttgcttgagctgagcgacggccgtgtcacgggccgcgcggaatcgatccatctcggcctgcgggtcgtcgattaagcggcgttctacggcataatctacggcggcgagcacgcggaccgtgccgatagcaatgccagcggatacgctgacgccctgtatcgttctcattacaggtgctccttgaggaatcgctcgaactctgcagcagcgacagcttcatcgttgccctgcacccgaaccgtaacctcgtcaccttgttgaacatcaagtcccataacaccgaagatacgcttggcatccacggattttccaccgtaggcaacggtgatgctcgattcatattcctgcgctttggcaaccaatcggccagccgggcgggcgtgcatgccttcggggtcggatacggtgaacgtgaatatctgaggcatgacgttgctccttacacgtccggccgtcacgcgcgaagacggcctttccgcaccagctacggactgatactggaaaaaacaaaaaaccggaatctttcgattccggctgtctgtgcccccgcagggattcgaaccctggacacgctgattaagagtcagctgctctaaccaactgagctacaggggcttggttagatgttgaagtattccttgcaacaggtgataaatatactcagatttgaagcgaatgcaactctcggcgtgtcgcgcctatttccggcgtttttgctaatacaaaaatcccccatgcggcgcaaaccgcacgggggatgatgcttaagctcagactcttggtctgtgtgattccagcactaggccggaatgactcactcggccacgaccttcacgaagaaggaagcggtgatctccgggtggagggccaccttggcggggaaatcgccggtggtcttgatggtctcgacctcgatggccttcgggttcaccgcagccttgtcggacagagcgacggcgatggcctcgttggagataccaccgaacagcttgccggactcggacaccttggcggcgatctcgacggtagtgccctcgatggcggccttagcggcgacggcgtcctcgcgggtagcgacggccttggccagacgagcgcgcttcatagcgacgatctgagcctcagcgcccttggtccacgcgaaagcgaggccctgcgggaacaggtagttgcgggcgtagccggacttcacgtcgacaacgtcaccggaatggcccaggttggacacggtcttggtgagaataaccttggtttcagccattgttcaaagcctccctaactcagcgacccgaggtggcgtacggcagcagggccatctcgcgggcgttcttgatcgccttggacagctcacgctgctcctgcacggtcacgccggtgatacgacgggaacggatcttgccgcgatcggaaatgaacttacgcagcagcgcaacgtccttgtaatcgatctcggtgaccttggcggccttcagcgggttcggcttcttcttgaacggcttgaccggcggttgcggcctcttacgtgacatgatgttctccttataaatcttgatattgattgctgctggcagcggggaggcaagtactgatcagaactccgggtcggaatcgtcgccgccgaaatcggaggaagcgccgaacgtggagaagctaccggcatcagatgcaccggcattactccacgggtcgaccgcaggagcggacgggttggcgggagcggcagactgctgggagtatccagcgccaccaccctgatagccaccgttgtaaccgccctggccaccggcataaccaccttggccaccctggttgccatagccctgattgggctgctgaccaccctggaaaccaccggaacgaccctggaagccgccctgaccggacgactggcgagtcacctgtgcggtggcgtagcgcagggagggcccgatttcatcgagctgcatctccacgacggttcgctgggaaccatcctgtgcctgataggaacgctgctggaggcgaccggtggcaatcacgcgcatgcccttcttcagggactgggcgcagtggtcggccagatcacgccaagcggagcacctcatgaacagcgcctgaccatcctcgaactggttggtctgacgattccaggttcgcggggtggaagcaatcgtgaagctcgccacggtcacaccgctgccaatagtgcgcagctcggggtccgcagtgaggttgcccacgatggtgatgacggtttcacctgccataacggtccttcttacttaccttgaataccagctgttcagctgactaaacgcttgattcagcccttacgaagaatcttcgtacggatcacggattcgttgaggttcagaacacggtcaagctcatcgctggtagcgggctcggcggtgtacttcaccacgacgtagttgccttcggtcttaccggcaatctcataggcgagcttgcgacggccccagtaatcgggctcatcgaaagagccgccttccttggtgacgagttccagatactgctcggtcagcttcttcagaccgcgctcatccagctcaggatcggcgatgaacatcagttcgtacttgtgcgcagacatcacccacctccttcggactattcggccacggacgttccgcggcaggagtgtgtatgcgtgttagcccatgacgcagcaccaaaccggcaccgcctcttcgggcaacttggacagtctatatatgaggcgggacagggtatgcccatattcttgccggtttcgcgatgtccaccgttttggccaagcccacgcagcccgcggctcccatcactcccggagcggcaccggtagccgcacctggcgcgacctccaccaccatgaatgagcaacagaagaaaatcttcatcatcgttggtgccgtggccggcttcctcgtgctgttcggtatcgtgtatggcgtgctgtcttccgccgtgttcagcgcgaagagcgttgcgaacagctatgtggccgccatctcctccggcaactacgacaaggccaacaccatcgccgatcctcacgtgaatacgaaccagcgcgcactgctgaccagcaaggcatcctcgggcgagaacacgcgcatcaccaacgcgcgcatctcgcagacctccaataatgccgatggcaccgtgagcgcccagctgacgtacacgctcgaaggcaaggaggtcaacggcaacttcaccatcaaagacaataaggtcagtgtcgagttctccgagtaatttcggcaatctcaacactcttacgaaataagcaccccgccgtggcgttcgctgcggcggggtgcttgtacactggttaaggcgtaaatcacacagcgactcaaacaaaggatgcgaacgcatgtcggcgattcttgaaggcactccggataaacgactcgtattggtcacgggccgcgcctaccccgagctagctgagaaggtggccgaatgtttgggaaccgaaatcctcgaaaccacgtcctatgactttgccaatggcgagatgtacgtgcgtttcaccgaaccggtgcgtggtgcggacgtgttcgtgctgcagtgtcattcgggcgatatcaacaagtggatcatggaacagctcatcatgatcgacgctttgaagcgcgcctccgccaagtcgattaccgtggtggcgcccttcctcggctactcgcgccaggataagaagcaccgcggtcgtgagcccatcaccgcccgtctgattttcgatctgttccacgccgccggtgcagaccgcattatgacggtcgatctgcacgccgctcaggagcagggtttcttcgatggtccggtcgatcatctaaccgccatgccggtgctgctcgattacgtgcgttccacccttgatctgggcaacaccaccatcgtgtccccggatgccggccgtatcaaggtgtccgaacagtgggccgccaagctaggcaatctgccgctggcattcatccacaagcagcgtgatattactcgtccgaaccatgccgaggcacatggcattatcggcgatgtcgacggccgcgactgcgtggtcatcgacgacatggtcgataccgccggtactatctgcgaagccgtgcgcaccctgaacgaatccggcgccaagtcggtgacgctggtcgccacccatggcctgctctccggcccggccgtggagcgcctgtctcactgcggcgcgcatgaaatcgtgtttatggacaccgtgccgattcccgaagagaagcgcctgccgaatatgaccgtactgtcttgcgcaccgctgctggccgcgggtattcgctccgtgttcgaggaaggttccgtggcgattctgctcgacggcctgcccgaggacatgcgtccgcgcaatatctatgcgtgattgatacgccgaaaatccttacgaaaaaacgccgcttggctattgatcaagcggtgttttttcgtatagctccaatcagatgaaggcgcgctcgccgaagatggcggtgccgacgcgcacgatggtggagccttcttcgatggcgtaggccatgtcatgggtcatgcccattgacagttcggtgcagtcggccgtgccttcggcaccggaggcaagaatctggtcacgagtgcggcgcagatgcgcgaagcccgcacgaatcgtgcgctcatcatccacatgggcaccaatagtcatcaatccctgcaagcgcagtccgcccatcgcaccgatgcgctgggccaagtcgatggcgtggctgggtgcgcagccggacttcgattcctcgccggattcgttcacctccagcaacacgccgaccgtgatgccgcgcatggtggcacggcgggcgatcttttccgccagttcgatggaatccacggattcgatggtgtccactaccggcagcaccttgccgattttattggcttgcaattggccgatgagatggaaaggaatatgcgttgcagctgcggcattggccgtgtcagcctcagcggcatcaatcacgcctagcgaataaccacgctcccccagtcgttttgccagaccgtcagccttgacagtaatctcctgtggacgattctcaccaatcacgcgaataccagcatcgatagccgccagaatctcgccgacatcgcgcgtcttggtggcagccagcaattggaccgaaccggcagcacgcccggctgcggactccgctgaggcaatccggtcaagcacgcgatgcacaccatcagtaatctcttgtgcgcgcgcctgatcgataacttcgttggcgagatccttatggtccatgtatgccgtcattgctgcccctgttcgtagattccccaccatcgtagtctcatacgcgcacataatgcttgttattgaacaaaagtgaagcccccgctgttcatgcgcgggggcttggtgatgctaggccgagcgagtgggactagcaggtaccggacttgcggcgcttgaggatgattacacccgcaacagcaagtaccacggcgaggatgccaacaccaagcacggctgcaccggtgtcaggtatcttcttgtgcttgccggagtctgcatcacccttgttctggttggaatcgttgccttggttgggcttgtccgtgccggaaccgggcttatcgccaccctggccaggcttcgtggtgctcttctcaaccagacccgcgatggcatcgctgattgcctcagtcgcagcctgtacgtcagactgggcggcctgaccatcactcgtcagcgcattcgccgtagcgactgccgaatcaagcacggccagcgattcatcagtccactttgtgcgatccacggcagcagcggcatcgagctgagcgctcagcgcggcacgatcttgcaccgtagctacaagcaccagcttcttcgctgcctgcttcagctgggttgcggcatccaccaccgcagcttcggtggcatcctcagccttatacacctgctgcgccgaatccaataccgccgcgtactccgcccatgaagtctcggtgtacttggaggcatcgtcagccttaggcgagtcagcgagcgcctgcttgagctcggtcttgtcgatcggtgtgggctcaggcggctcaggcgtactgtcgtcaatggcatgaacctgccattcggcaacagccggagaagccgagccggacgtgataaccatacgcaacttggtagtcttgaccggagtgttccacgtgccatcagaccaccccttggcatcgccggtggcccagccagcagacggtgaattggcggtcacagtgtaggtggcgtcggaaatatccacgaagttgccggcaccgttgttcgccaaggcgtcccagtactgcaattcccacgatgccggaatacccaatccgccatcatccgaggtgaattgcacgcggctagagtcgatagtcacttcacggtcccactcgtagtcgaggcgcatctcaccggtgttgggccaagtgccccagacatcctcgttggcaatggtgatatcgggaatgatcttgccgtcgttcaacgcggcggcacccttgacccagccggatgccttgccgtccacatcggtggcggtggcatcgccctcaatgtagccggtcagcggcacggaagtgtcggatggaatgtcggttttcgccgaagcggacacgttgccggccttatcggtggcgcggtagtacacggtggcgcgcgacgcgctcggtgcagcaatcggcttgctgtacgtggcccattgaccgtctgtgccaatgcggtattcaattgatgcgacaccggaaccggtgccgtcatcagcggtcaaggtcagcgtgcgctcctccttatcggcggcggcggtcacggttggcgcggcggagtccaccttgccgccggccttggccacgtcggaaacgttgccggcctgatcggtggcgcgagcccacacttcgacatcgccctgctgggaaagcgtggcaatggccgcgtttgcattcgcggcgatggtggtccagctcttgccttgatcagcggaaatctccagcttggcgataggtgcggtgtcgtccgtggcctgcacggtggcgaacggagcggtggtgagccactcgctattgcctgcgttagcagtaacggcaacggttacagtcggcttcgtggtatcagcggcaggctggtagccgtcctgcacggtgacatttaccgacacattgccctgctcgcttgcctcaccgggcacgccggcgaccacgccgtaggccgtaaacgaaccgaccttggcatacgaggaagcatcaactggacgccaaattactggggaggcaacggttgggttcccgtacttcacatccactgtggccggcagagtaggcgcagtaccggtggcggtggtcacgctcttcggcgcagtgattgccggcgattcgctggagtcggagccgacttcccattcagcaacggccacggaggcatagccgccatccacagcttgaccggtcatgtcgagctttaaggcagtagtggtcaccgcatcgaaggtgacggcgttggggttggccttgcctgtggtcgttgtataggcactcgggttggtgacatccttccatgtgccgtccgcgtccaagtactgaatcttccacgaggcgggcgcgcgcagagcgttggaatccacgtcgaaccaaaccttagacgagttgacgcgcacagtgccatcccattggtagaccagagaatcgccggactgcgattgcgggatagaacggtagttggtccagtgattcggcgggaccacagcggtttgcaacacacggccgtcgttcaccgaacccttccaagcaggcgtttcagtgaacgtggcgctcacctttgcgtacggagccacgttggtggagggctgcgttttctcggccttggttggatgggcggtggaaaccatctggccgtcggcggtccaatcgacttcatcaatgcacacggcacggcggaaatcggtgccgccttccttgtcgccggtgtgataggtcacataccatttgtcgccgaactggagcaccgaggggtgcatcgtggtggccgagccagaaggcacgattacgccttggtacttccatgggccgagcgggctgtcggaagtggagtactggatgcaagcttgatagttcgattccacgcaggtggccgtgcccgaaccgggcttaccgccgtcgtacacgttgtaataggtatcgcccttacggaacacccacgccgcctcgaagaatcccttcgggccgttcgcgttgctgtccgcgtccttcatggtgtggaggttcggcgtggtgccatcagccttggtttccacctcggtgtatgaggtgcggccggttgtggcgtccttcttcatcttgatggcgagctgagtgccgaacgtaccaaagtgcaaatatccggtgccatcctcgtccacaaagaatgccggatcgatggtttcaatctgggtttgcgatgtggtgagcagcggcttgccgatggcatccttccacgggccgagcggactcttcgacttggccacgccgatggcgaacgggtcctgtccagccgcctcagaagccttgtccttcaccggcacgtagtagtagaaccaatcatcggaagtgtcgctcggggtgccgttatcgtcggctacgacttggccggcgtacgcgccatcgccggtggcccagctgaacaggtctgccttggcgatggtcttgtaatgtgtccatttgccttgattcaggccgtcttcatcggtgacgtatacgccccagtccttcatgttgaaggagccgtagtcgggcgaagcctcatcgtgaccggtgaagacgaagagtttgccgtcatagctcagcgcggatgcatctgcagagtagtagttctgcgaaagatcgttcggggtgtcaataccctcgttctgcccgatggggttgcgcatgtagctgggcagtgcgctattgtcgatttgggtgacggtgacatcaggattgttatacggcagttcgttatacgcgtgaccggcaacgctgggcgcgttgtcagcggtggctgaatcggcggccattgcggtcggcgcaagggcaaggcctgacagcaatgtcgctgcggcgacgagtccaccggccaccgcgcgaaccgattgcgcggatacatggaaactcatagtgctcctcattgagtgagtgaaaagagtaatgatgggtagaaggaaaaggctagagccccctctgtgagggggctcactcggcagaatgactccgttgcgggtcaggccgagtggcgagccgaaccgtggtcgccggactggcgacgcttcaggatggtcacgcctgcggcggtgagcagcacggcagccgcagcaactacggaaaccgcggcaccagtcggaggcacacgatcacccttgttgtccttatcatccttatcagtgtcggtcacaccaggctgctgggagccgggcttctgctcaaccttggtggcccaaaatgccttgtcaagagcatcctgtgcggcatcgacgtcggcctgcttggcgtccttgtcgtcgtacaccttctgagcggcggcaatctggctctgcagagcctgccatgccttctcggtgtacttcgacttgtcagccttcttggcctgctcgatggaagccttgagagactccttcttcaccgtttcgacggcgggcttctcttccaaggccttgacggccttgttcagcgaagcggacgcttcctggacggcggcctgagtgacctcaccggactcatcgcccttgagcacaccttccgcagcctcgatggccttgttcaaggcctcgacactcttatccgtgtacttgccggaagcggcctcggccttggccgtgtcgatggccgcctgcaacgtggacttctccacgtcggtggcgagcgcaacgagcaccttctggccgtcctcgagcttggtcacctgctcggcgacctgttcttcggtggcattgacatcgtcgtacacagcctgggcagcgtcaatgatttgctggaactcagcccatgaagcggcggtgtagcggcgtgcatcgaggccgttggctgtgtcaagagccgacttgagcgcggtcttgtcgaccggggtaggttcaggctcggtgccgtcaataccatgcacgccccactcggccacggcggccccgaaggtgctgctgccggtgtacggagtgagcacgagtcgcagcgacttggtggtgaccggcttgaaggtcacagcgctccaacccttggcatcggtatccgcacgagaagccggcgaattacgcacgacggtgtaatcctcggtgggttcgacgtccttccaagaaccatcctcggcgaggtactgaatcttccaagcgtccgggacttccagaccacccttcgaatcgtcagtctcagcgaagttggcccagaactgggcgcggctctggtcaatggtcacggactgaccgaagtcgtactgggcgtacatgccgtcctttgccttgccccaagaaccccagaccttgtcgttgacgttctgatcatccgtggtcggccaagtatcatcgacgactacgccgtcgttgagcttgccttcggccggtgaccaggtcgcctcggaatcaggcgaaatggtggtcctggtcgccttgccttcaatccaaccgaccaacggctcaggctcaggctccggagtggaggaaccgttcgggtcggcaaccacgtggacagtgagcttggcagctgcggaagatgaaccgtcgtcgacggtaccagccacctcgtagtcaccaaccttggtcaggtcgatggccttgatgtcggcatccttccacgtgaccttgcggtcgtcgttgtatccgttcgggaacttcaccggaaccgtggcgggcaggtcgatggacttggcgttctggtagacggtctgctcaaccggctgcgcattacccacggtctgcgatgcggtatcggaacgagccgcgatgtgtgcaaccgtaccgttcagcgcaccggcgacggtgcccttgacatcgaatacggcatcggcggccagctgagcgtcggtcaccttaccccacgtgacggcgaggtcacggcgagaaccgtcggtgtatacggcgctcacggtggatggcagcttcagatcatcagccttggaaccggtctgcaccagtcggttgacttcgtccacgctcaccggctcgatggcgtacgcctcgaactcggaagcacccacgatggcgcccttcgggaagaccacgcgcagcttgtcggtttcgacggcgtcggcgaacttcacttcgttgccttcgttccggttgaccgtgtaggactggccgtcagccagtttcacatcctgccagttaccgtcagcgtcagcgtactggagcttccaagatgagaccatcggcacgccaccgccatcggtccagaagaagaccttggccttcttcagcggcaccttgccggcccacttcagttgcagccacggctccacaccagtggagtcgccccagttgttccaggtctcgttcggcgtgttggcgtataccacctgaccgtcgatgaccttcttggcgttgtccttcggctggtagccgttggtgtagctggcagaggcgctcgactgcggggctacgttcacggtaccgtcagaggggatgccgtgaacggtgatttccttggagccttccttctcgccatcggaagcggtgagcttcaggacgtagtcaccctccttgttgaaggtgacggtggtgctggcagcggaggcgtccacgaacttcgcagtaccgccttccggaccggagacctgggaccatgtggtggtgacgtcgccttctgcgggcagaccgtcatccttcaccgtaccgacgagcttggcaccagatgaggtgctggaagacacgtaagcatccacctgcggagtctggttctcggaagtgccgtcagccttgataccggtgttgtaggcttcgatctccttgacaccgacggccatgccggcctgcggcgtgaaggtgacgcggatggtcgtggtctccaccggagtgaactggatacggttgtagttcgcgcccgcgtagttcggggtgcgcacctgatccgcaatcggggcccatgtgccgtcatccttctggtactccaacttgtagttggcgggctcggcatagccggagatggtctggctggacgagctctggtagaagtacaagcggaggtcgtcgatcttctgcttgccgtccttgaacttgatattgagcgtgtcggtcttgttctcagaacccttggtaccccagaacgattccatcacggtcttgccgtccaccgcgttcttggccgggtagttggtgtccttctcggcgtaggtggtaccggtcacgtccgcgtccttggccacattcgtggtggacttggaagcggagtcgacgttggcaccggacttggcgaacaggtcggtcacacgctggtcggcggtgaaggcaacctggttggcggccttgatatcagaaccagcggcattggtgatggttacgccggccttgtcggcatcctcaacggtgcccgtggacggatcgtaaatgaggtgtgcgagcttgtcggaagtgaaggcgagcttgccccccacgtacaggctgtagccagcaggtccaccatagtggctgccgtccttatcccacacgatggaaacatcttgaccgtggtagctcaggttgttcaccgtgaagtagttccagccggggatctcaatcgggttcagctcaatcttgttatcctcgcgcggcaccataccggctacgtcctcgaccatcgtccagttcgtggtgccgagctgggtgtggtggatccaggagcggtaggtgatcttgccgccgttctgtgcggcgtcaaggttcttgtcgaggttgttgatcacgccgtcaccgttcacatcgccgacgttgttgttgtcctcgttccagaactcgttctgatcagggtagttgttatcgccgccctggtagtgcgcgaacgccacccagtacagcagcttcttgaactgctcattggtgatgtagccattcttggctgcatcgtagttgcgaataccggccgagtagacctgcagcagcggctgcgcattaatgatggagaagttgttggaaccggggaagttcaacgcggccttgtccgcctggttggcggtgaagaacgggaagatcgggaactcgttggaatcctcgaacaggcgcagagccttgttgtaatcttcgttgccggtaggcatcaggccttcggagtacgggtagtagttattgatctccttgtacttggcgaaagcaccgtcgttcagccacttgtgcttgagcaggttgtcggacttgtcccacagttcagtggtgacttctttctggatcttgtcggcgatggcctgcatcttctcggcgttggcggtatcgccagcggccttgtaggcctgagcagccgcattggcgttggcccacatattggcggaaccatcggcgcgatccatgcgctggccggagcgacccggctcagagaaggaaacggcgtcggcatcgttaccggtcatcgaccaccaggaccagtcaatcaagctgttgtcattgttgttctggttgtcgttgttgtccggctcgctcttggaagcgagtagaccttgcacgtcctcggcaccctggtcggccagcttctcggccacggtggacggaccgccgtgcaccttgtaggagtcccagccggcgcgcgtgatgtactgcgtgtagctatggttccagttggccgggtcgcccggattgtcgtggtagtagtaatagcctgccttgctcttcttggcggtatcgccggcggaaagccaggtgccgtaggagtactcggggttgcggaaccacttggtgtccatcatgaacatgccggaggtgagcacgatctggttgttgtagccgagcacaccctcgatggaggtcgggtactggaaggtgttgccaggtatgttggcgtcgagcatgttgaaacgactcagccaccagcggtagaccacggtcttatcgatgttgtcttccggagtgtccacatagggagcgttatcgacccaccacttgttgtaggtggtcacggaatccttgtaggaggcggcagcatccttaaagtcgccggtgtaacgggcctcatattccttggtggagtcaggcagttcgttggcgatcaggccgagctgaatcttgacggtctgcggttcgttggccttgaggctcaacgtgctggtgagtttgccaccgctgacgatccagttggaaccgtcctggttgttggcggagaagcgcggatagatggtcgtcaggttgttcttgacgttcacgcggccagtaagttcggtggcaccatcagcaccctcggcggcgaacggcgaggccgtggtcagtgtgacatcgcggtcctgcgtgctttccacggtgaggttcgcaaccatcacgttgttgtaggtgatgtacttaacttccttgatcttgaggctcttgccaccggtctggaacagggaggtgaagtagctcggtgtctgcttgcgctgggaggcgtcttcgttaagggtctggtttgcaccgtcagcgtttacggtaacggtaaagccatccctgttggtctcatcccagtaggcggtgttacccacaaaaccgagccgattaggcgtgtgcgtgtacatgtaggcggcgcgaccacgggtgaacaggtagttgttgccgtcggagccttcatacgagtaagcacccttgtcgttcgtgcctttaccagttggctgtgcaccagtacgggtgagaatcttatcgatccagaagtcatggtcggtgtcggtgccggccaggttcttcacgtcgttatcgaatgtctcctgcagatagctggcggcagggttatatgtggtgttgttcgccgccgtcttcatcggatcatcagatcccttgaacgacggatatgccacatccgcattcttgatgacgggcgtatcggctgcctgcgcggtgactgcaccgccggtggccagtgtggcgaccgctgcaaccgcgccgattgacgcaagccaccgctttcgtgttgattgatgcattcctgcttggacctctccgccccggtctttcgcgtcttcgctcaggctacgtcgcgtctatgcgaccaggacttcttctgtggatgctgggccgcagagcccgttctccatcagtttcctttattggttattgggttcaccggaatgagtgtcttcagtaaatctggtgtgatatccgccatggatatcccggttggagcaattcaccgaagctgattccacatcataaccgagcgaatacggtttcacaactttccctcagtgatatcaaccatcttatgcaacaaaaacccggtaatttctcagctttcgcatttattttcgcattagagcattgctgcgtttcgccgtgtcgcagtacctacggcgcaacgattcagcctcgctgaatcaggaaccaacaggctcccgctggcgggagctggctcgcaaagcgagactgagggtggcttacacggtaccgcttatgaccgccctcagtcgactccgccgacagctctcacagcaggagcatataattaaaaaataatctcctgcacgggtattaccccgcacaggagacctcattccccggatgtgttttcggctccaatcgatactgacatccggcctatgccgtcatcgacttattacagacgatggcggcataagtatttttttgccggccagttgcgcgcaggccggcatatcgccgatatttatcgacgctggaagacacgcatctcgcctatctcgcggttggcccacgagtagtacggcaccaagcgcagcgtcgcgggttcgcccgcacgcggttcgtcggcatccacgtacagcggcgcgtcatcctcgtcggcgtgctcgcgcactgccggcaaatcaacggtatcgacgccacccagcaagtcggcctggaaagccacagcggcatccgcaccggtgacgccatcggccagacgatagttccacagatcaccggggttatcgacctgttcggcgcagtagaccagcggaccgcgcataacggccacctggccggcgtcggagcgcacgcgggagttggcgcgcacgaacttgacggacatgtcgagctcgagcgcaatctccaacgtatcgccggcgttgaccacaaggtatacgaagccgtcttccagcgaacccactgcgggcttgccgttcacggtcagcgtgtaggagcccaaggaccagccggggatgcgcagtccaaatcggaccgagctgtccgcagcgctggcgggcaggctcaccgtgtattccacgtgactgtcccacgggaagtccgaacgctgttcgaccgtaaggccggaagcaaaatcggccttgttggcgatgaactggtggctcagcacggtcttgccgccgtcgcgctcggtgtagatgtaacggtccactgaagcgatgagtcgggcgatgttggccgggcagcatgcgcagccgaaccagtcgacacggtgggagagcacgtggtgacgatccgggttgtccagtccgtcgggagtagtctccagtgcgttgacgtagtagtactgcttgccgtcaagcgagatgccggcgatggagccattgaacagttccttctccagcacatcggcgtattcgcccttgggctcgaggtcgagcatctgctgggcgaacatgctcatggccacggaagcgcaggtctcgccgtacatcgtgtcgttcggcaggtcgtaatcgtaggtgaacgattcgcccacatgggtggagccgatcgcaccggtgacatacatgcgacgggtgacgatgttcttccagaaacgcttggcagtgtcgatcagcccctgatcgccgagtagtcggcccacgtgagccacgccggtgcacaggtaaccgacgcgcacggcgtggccgtccgcggtctgctggtcgcgtacgggctcggcagcctggaagtaggtgggcttgtagaagccgagatcatggaagatgttgtcgccgttcatcgccttgagctgcttggcgtagaactgcggatcctgaccgcgcacgtcgatgagatactgggaaagcgtcagataacgcttctcaccggtctcttcatacagcttggcgagggcgagctcgatctcaggatgaccatcggcgccgtggatcttgccttcttcggggccgaagttggcatccaggcagtcggccatctttttggcgacttcaagggcctgctcgttgccggtcacctgatggtaggcgacggcggcctcgatgtagtgacccatcacgtacatctcgtggctctgctgaatcaggctgaagcgcgggcggtcggcccatacgccggacttgatctggtacggggtgtccaaatagccgtccgactgctgggcgcgggcgatgagatcgaccgtgcggtcgcacagcgccttgagctcgggatccgggtggtatgccaatgcgtaggcggcttcctcaagccacttgtagacgtcggagtcttggaagaccatgccatggaactcgtcgtccaattcgccggcggcaaccttcaggttggcaaccgcatggctcttgttgtcagccagctggttgccggctgggtcgtcgggcaccgtggtgtcgatctcgtcgttcatcacgccccactggtaggggatgacggattcgacgatctggtcgcgacgccgcttccagaacggggaagtgattgtaacgttcatgatcagcccttcacggctccagccataaagcccttgacgtagtacttctggagtgcgaggaacaggatggcgcagggaatcagcaggatcacgacgccggcctcggtggcaccgtagtcgatgacgcccatggtctgctgacgcatgttcaccatcgccagcggaagggtggacttggacgaagagctcaagtacagcggaatcatgaagttgttccatgcttcaaggaaggcgagcaggccaaccgtaaccatcgaaggcttgaccaccggcaccaggatcttgaacaaggcctggaggctgttgcagccgtcgaccatggcggcctcctccatgtccttggggatcgcgtcgaacgcgttgcgcatgatgaacgtgctcataggcagctggaacagggtgatgaccaggcccacgcccagcaggctgtcgttcaggccgatctgcttgtaccagaccatcagcgggatcagcagcgaggcgtacggtaccatcaggatcgacagggtgaccatgaagccgaggttgcggcccgggtagtcgaagcgggagaacgagtagccggccagcgtacagacgaccacggagaacacgaccgcgaccagagtcacgattaccgagttgaacaggtacttgggcagaccttcctgataaccgaacagggtcaggtagttggccacgccccagcccttggactgggccgaaccggcctgcgggctgaacgagcagatgatgacccagaccagcgggctgatgaagatgatggccagcagggcctcgaggatccgggcgatgatacgcttccacaatggggtagtcataatgtgttacctcccctttctcacttggtgttgtcgcgcatgccgcgcatctggatggagttgatgatgaccagggccaccagcacgatcagcgagagcgccgcagccatacccagatccttcttggaatcgaaggcgaagttgtagatgagctgcaccacggtcatggtggagttgttcggaccacccttggtcagaatgaagaactgatcgaacgcgaggatcgagccggtcacgcagtagaccaggcacatcacgatggtcggcttcatcaacggcagggtgatcgagcggaagatacgccaggaaccggcgccgtccatgcgggccgcctcgtacagatcaccggggatggcctgcagaccgatcatcatcagcagcatgtagtagcccgagaaacgccaaacaatcacgataatcgtggcccacagggccgactggccggtggccagcaccgaaccaccctcctgcatcaggcccaacgagctcagaatcttggtgacagggcccacctgcggggaatacagggcgtagaacagcagggacgcggacgccaggcccgtcgcggacggcagcaggaagcaggtacgcagcacgttgttccacttcgagctctcctgcacaatcatggccatgcccagaccaaggaccaacaggaagaccgtgacgatcacggtgtactcgagcgtgaaccaaatcgagggccagaacaatttgttctcgaacaccttgacgaagttgtccgggaagttcacgccgcggttgccacccagcaggctccaacgagagcaggccatgacgaccagtagaacaatcggcacgaagaacaggacgataatcatcagccagtccggaagtgcgtacagcagacctcgcctggtctgcgccgccttcgccttggacttatgcacgggcacagccccggcgctcttggaaacactcgacatgtttctctctcctttgggaaattactgtgaaatggtaatcacggaatccgaatgcaatccgatgtcagggcttcgaggaaggaggactccgaagccccgccaacacaccgcattcataaggtatgtagtgatgaaggaagagaaggaatgaagaagaagatagaagttcgattatgtggttgagccggctcctgccctcacaagggagggaccggctcaatctgttcagttattattcagttattgctgtgatttgatgagtgatggtgaggagcatcaccaccgaatcactgggcagacaggacgtcggtgacggccttgttgtcggccttgaggtcaccggaaccccacacggcgttctgcacgagcagctgccacggggagccagcggcgttgaaggcttcgttgaaggccggggacttcggggtctggccgttgccgtcgataatcacggagttgatggtctggatgcgtgggtcagcgtctttgtaagcggtcttcagggtctggatgttggaggcggtgtcgccttggtcagcgaagacttccttctgagcgtcagactgcatcagccagtagaggaagttccaggcctgagcaacgtgcttggagtccttggagatacccatggcatcgccgccgaggaacgtggaggtcttgccttccttggtgcccgggatcggagcaacgccgacctcgaagccgccgtccttctcagcatcgaacagagcagtggtggaggtgttcgggtaaggcataacgccgatcttgccgttcgcgaacggagcggtccaggtggcgccggtctcttccttggagcctgcacccaggccgttggtggtgttggccagctccttgtaagcgtccaagacgcccttcatggagtcgttgtccagggtggcctcggagccatccttgttcatgacggattcgccgtcagcccacacggacgggaagaggtcgaagaccagagcaccaccggactgaccggcgaggtaggagcctgcgacgccatccttgttgagggcggcgaccttcttggcctgctcgacgaactggtcgatgctcttcggaccctgctccgggtccagaccggcttccttgtacaggttcttgttccagaccatcacggaaacgtcagtgatgaacggcagggtgtactcggcgccgtcaacagtaccggcttcgatgtggccctgctgcaggtcggccttgttgtccaggccatcgatttgcttggtgatgtcggtgaagatgccctcggaagcccagtacggaatacggaccacgtcgccggcgaggatgtcaggcagggagtcggtctgcgaagcgccgccgaccttgccttccatatcgtcgttcgggatgatctcgagcttgacctggttcttgtggctcttgttgtaagcctcgaccacgttcttggcctgacgctccagaggggaacgggtccacagggtgatctcggtaccatcgtcggcgcccttggccgggataccttcggcggtggcagtgccaccattgccggagccaccacaggcggccagcggaacgatcaacgcggcggcagcgatgccagcaagagtacgggtcagtttattgaaagacaccatgttcgcttctttctctatatatccgctcaactatgagaggcggtggcggacggtccgcctccttggtttcgccctgctcgctcctttgcccggagcaggtaacactgcgaaagccttttctcaatataaacgaacatggaagtttttgcaaaagcgctttcgcattttcgcgttttttctcacatcaaacgggttcgagactgtgattcgactatgaataacgtgcttgaattggcttaatatcaatgattattccggcgtgtcgagcaaatcaaacaaaagcgaacatggaagtaacgctttctttcacttaccttgcacttgaacaatttccctgactacgccacgccgaaaaaaagatgtttgcgaaagttttcgcattgaagctacaattattcccagatgcaatggcacaccacaccgtatgaggtatttcatcgcaaaacaatgcgctatatactgctgaagaaccaaggaatcgaggcatgatgacccagccagcaaccggacgggcagcgcgacttgaggatgtggcggcattggccggagtctcgacggccactgcatccaaggcactgcacaacaaaccccgtatcagcgaagaaaccaagcagcgtgtactggatgccgccaagcaactcaactactctcccaacaaactcgcccaatccctagcccgcggcaccaccggcactatcggcctggtcacctccgatctgcagggtcgtttctccacaccgattcttatcggcgcggagaacgagttgcgagcccaatcgacctcagtattgttggccaacgctcgtggcgacgccgccttggaacgtcagcatgtcgagaaactgctgtccctcaaggtcgacggactgctcatcgtgcagtgcgagaccaaccccaggcccacgcttggccatgactggggcgtgccactggtctacgtctacggcccctccaccgaccccaaagactgctcggtcacttgcgacaacgtggacgccggccgcatggccatcaaccatctcatctcgtgtggccgccggcacatcgccattatcggcggcgacgaaacctataccgctgccaccgaccgcaccaagggcgcgctcgaggcactctccgaattaggtattgaacccgccggcccaattcgttacggcaaatgggacgaaggctggggccgcgccgccacccgcctgctgctcgaccaaggggtcaagttcgatgcagtggtctgccagaacgatcagttggcccgcggctgcattgacgtgctcaagcagcagggactgcgcatcccggatgacgtcgccgtcatcggccacgataactggtcggtactgacctccagctcgaggcccgcactgacgtcgatcgacaacgaaaccgaaaccatcggacggcgtgcggcacgatacttggtcgatgccatcgacggcaacccgcatcacggtgtcgactacgtaccctgccaccttatccagcgcgaatccaccctcccgctggactgatatcaatcgatgccctaccgcttcttggttttgcgcccctttaagtagatgtcgatgacgatccatacgccgagggcgaaggccacgacgtagcccatgaagccgatgaccggaatgccgaagataatcggcttcatgccggcgtagtagacaatcgacgagccaacgaacaaaccgaccacaatcagggccatcgtcagacgattcaccatatccgaaagcagctggaacggctcttcagagccgaccagttccatgttgacgcgcaactgaccacgggtcagcatacgggccacggtcttgagttcggtcatggtgccgagcgtggcatgcaaagcctgatgtccctcaacgcccagcgacttgatctcgtctttggtggcgttcttcagcgatttcgacgtggcgatatggtcggaaatgatttcgatcatattcacatcaggaatgaactcgtccagcaagccttcgagcgtaaccaacgcgcggccgacggtggtcaccgtactgggcacctcgatgttgtggcggccggccatctgcgtcagtgcggtcaggaaggcggcaatgtccaattcggccagatccacggtgccgaattccttgacgatcacgtccagatcagccagcagtgctgggtagtcctccggatcggcctcggtgccggcaaatcgcagcagcccctcggccagagcgggcgaatcctgtttggcgacggcgaaaatcatttctttgaggactgcacgggtgcgctggtcgagccgaccggtcataccgaggtcgataagtacgatctggccgccccggatgatgatattgccgggatgtgggtcagcgtggaagaagccgtcgtcgagaatctgcgtggcgtaattgtcgacgagcttggtgccgatctccttcaagtcataaccagcatcgacgagccggcccgggtgggagacggagatgccgtcgatgtactccatgaccaccacatgctcggtgcacagttcggtgtacgccgtcgggcagtccatgtatttgaatcgggcggcgaaacgcttgaattcggcgaggttgcgggcctcgatcagaaagtcagtctccgattcgaaggtgtcccacagctcctcgaccacgcccttcaggtccacgatctgtgaggtgcgaatcaccttagtggcggccttggctatggagcgcatgatggagacgtcctgagccatggtttcgcgcacacccgggcgctgcactttaatggccacatcttcgccggttttcagcgtggcgcgatgcacttgcgccagtgaagcagagcccaacggcttgggatcgatatgcgcgaacacctcgtcggcgggacgcccgtattcggcggcaagcacatccaacaccgtggaatacggcatcgggtcggcgtcggcgcgcagtttggcgagttcgtcgcagaagctttgcggcagaatctcggagcgcatcgacagaatctggcccactttgacgaacgtggggccgagcgcctcgaacatgaggcgcattttgaccggagtcaggccgtgcagcacgtcgaattgctcgacgattctggtgatctgccccagtcgtttgatcttgccacggcgcgtcagatggtagcgcgtggcgaaatcgttcctgcgtccgaacagtgccagcgtttcgtcggatacgctcggagtcgccttggtaacggtctgcttgagcgtgtccgacgtgtcgacggaccggttcgccgccgcctcacgttcggctttcgcaggcgtcagaatagggtcgaccctgctggaaagcggggtcgaccctgattccggcgtagcgcgtgtgggcttggtcactcggccttgccctcgtcagcgggcttgtcggcggcactggtgtcggctgcggcagcagctttgtcgccggcttcggcggcggccttcttggcgtcatccaccgtctcgctcaccttgcgcttgagctcggtgttcagcgccttgccctgctcgaccgtaatctcacccttcttgacgagttcgtcgacgagctcgctgctcttctcgtatccggtggcaagggctccgatgcccgccagcaggaccttgcgcaggccatcacccagaagatcaaaatcagccatgatacccctccttcgaggtccgacatggcctggtgccatgtctcgtaccaccaagcctagcgcaaacaacagggcaatgtactagaccctcagactgatttcgactgatttttcgctgattggtacttaccgaggactcaccgagaattcaccgaggacgttcggcggcagccttgcgcgcgttggtggctacttgatcgagccgggcgagctccttggcttgttcgggggtctgatcggacgtatcgaacgtaccgtaacgacgagtcacggcagtttcgataaggaaatcgctgatggcggggtttttaggcagcaacgagccgtgcatgtaggtgccgatcacgttgtgcacgcgcgcgccctcggtatggtcttcgccattgttgcctcggccgtcctgattgacggtgccgagtggctgaacgccttcgcgcaggaaggtctggccggagtggttctcgtagccaatcacatcgccgaactggtcggaatgctcaacaagattgccgatcatacgcacgttctggcccacggtataagcaccgataacgccgatgccgtccagacgggtgccgtccacggtttcaaagtactcgccgaacagctggtacaggccgcagatcatcagcatcggcgtaccgtctgcggcaagcgaacgcaacaggtcggcgcgatggtagaagtcgtcgatgattttcttctggccggtgtcttggccgccgcctcccagaataaggtccacctggtcgggccagtcgtcgccttgattgtactggtggacgaccggttcataaccgtacagttccagacggcggcggatagtcagcacgttgccggaatcgccgtagatgttcatgtctttgggatacagggacaccacatcaattgttctggccatgtcacgttctccttgtcgatgtcttcccgctgacgggaagcgtcttattcctcaccatgtcctcccgcaggcgggaggtggcgcgcgggcgctagaggatagttacttgcccacgcccgcgtcccgtacttcggtgatgcggcccagtacggcgcgggttttgagcatggcggtgtaggtgcagtagatgtgcttgcgtgtgccgggattggcgttgacgaatgcggtgacggcctgttcgaggtcggtgttcgtatcggcgactggcacttggtcataccccaggcgcaatgccatgtcccaggcacgcacgccggagaccatggcgacaccggacgcgcgcagggaagtgaagtccacgtcccacagccagctcatgtcgcggccgtcggcatattcgtcgttgatggcgatcatggtgtccgcgttggccgggtcgaagctggcgagcgagaggcggaagcccatcgggttcttgaccagcagcagttcgaccggggaaccgttgacgtcgatgacctcgccacggccgaaagccggcgtgacgcgggaaacggcagcgataagctcgtcggcggacacggcgcaggcgttggctgcggcggtggccttggatgcggcggcattgtcttgcatcaccgcacgtaccacagcgagcgcggcggccgcgttgtacaggttgtagacgccttcaagcttgacgtcggtggcgtagccctgaccgtccatctggaaggtggccttgtggtcgcccacggcggtaagtgtcacgtcggcgggaagttctgccgtgcctgtggaagctcctctcagttcgcttcgcggactgagaggagttctggctgaggggagcggcccggccgcaccttccaccgacacggtcgtggccatgtcgtcatcggacgggaaatagtggcgcaaatcgtcggcgaggccgaagtatcgcacggtggtgccagccggggccttcgcggcgagcgcggcgatacgcgggtcctcgcggttcagtaccacagtgccggtagtcgccgcagccacatggctgagcagtttggccgtggtgtcgatttcaccgaatcggtcaagctgatcgcgcatcacgttcagcagcaatgcataacggggcttgacctgcttgacgaagtggacggcgtacgcctcatcgagctcgagcacggcgatgtccgcgtccaatttgccgccgagcgtgacttcggtaagcagtgcggagaccacgccgcgcacgaagttcgagccggtcggattggtgaacaccttcagccccagatcggagagcatcgaggcgaccatgcgggtggtggtggtcttgccgttcgtgccggacaccaataccacgccaagcggcaactgcccgagcgtacgggtcaggaagccggggtcaatcttttctacgactttgccgggcaaagccgaaccgccatgtttggtgacgcgggatgcaaaccgcacgaagcggcctgcggccacggtggcgaacgcataccacggtttgcaggtctgcaccacggacgattggtcttgcgaaacatcgcgtgaaacgttgcttgccatcatcacaccccctgattggcgttgtagtcctgcggcatgtctttgaatttggacgtggcaccgaggaaggcgaggtggaaggtttcggtcgggccgttacggtgcttggccatgatgatatcggcctcgccggggcggtcttccttgtcgtagaagtcagggcggtggaccaggaacaccacgtcggcgtcctgttcgattgagccggattcacgcaaatcggagagctgcggcttcttgtcgttacgcatttccgggccacggttcagctgggaaagggccacgaccggcacttcgagttccttggccaagagcttcagggcacgggagaattcggacacctcttgctggcgggattccacggccttgcccgaggtcatcagctgcaggtagtcgatgactacgagtttcagatcgttggtctgcttcagacgacggcatttcgcacggatctccatgaggctcatgttcgggctgtcgtcaatgaacagtggcgcgttctgcatcttggtccagaactggttcagggtgttccagcgttcgggggtgatgtcgtcggcgcggcgcagggcggccatcggaatattggtttcggcggagataatacgctgagcgagctccaccttgctcatctccaagctgaagaccacggaagtcatgttgtggtgcaacgcggcggcgcgggcgaagtcgatgccgagcgtggacttacccatggccggacgtcctgcgacgacgaccatctgtccgggctgcaggccctgggtcacgtcgtcgatgtcgcggaagccggtcggcacgcccttgttgacgaggccttgctgcagtttgtccagctggtcgagcgcgtcgtggaccaccgggccgatggcggcatagtcctgacgcaccttgcccatcgacatctcgtagatctcggactgggcgaggttaaccacatcctcagcctgcgatccctcggcggaataaccgagctgggcgattttggtgccggcggcgatcacattgcgcaaaatggcccgctgatggacgatctccgcgtagtacatggcattagcggcggtcggtacggatgcgacaaggctgtgcagatagtccgcgccgccgaccttgtcgaggttgccatccgccaacagctggttggccacgagcaccacgtccaccggctgactggcggaaaacagatcgatgatcgcgttatagatcgtctgatgcttgggctggtagaaatcggtgacgtcaatggtctgcgagacctcgccgatggcatccttactcatcagcatgccgccgagcacggccatttccgcgtcgtcatcatgcgggggcacgcggtcgaaaatcgggtcgccggccgccgccgacgtctgcgtgccgccccggcccgcgcggtcgccacgatcgccacgatccaggccaccgccgaacccattctgatacgagtgttcacttccttctggcatagcctccaagtataggatgtggcgtggcaggtgaacgatatcgtatggaaacgaaacggttgcccgcatcggttcattccttattcacctatgagtcagcgccacgacacgcagaaagcaaaatgtggatagaaaaataagttatccacattttggggataattctggggataatccactaagttatccacatactggggataacttggtggatagtctggggataacattccgcgcccacaacaggtgcttgcgcaacgcagtcaggcgtgatatgcgtgtgagcgtgcccatagactcttccgacgccaaagccaccagttccggcgatactacacgccgcgatggcttcggcaccccgcatgccggcgcaaacacaaacgtcagcaacggcccgaccgacgcccgctccaccaaccgccggatcatggcgctggccctgccgaccttcggccagctcatcgccgaaccgaccttcatccttatcgacacagccatcgtcggccatatcggggatgcggcgttggccggcctgtcaatcggctccaccatcatcctcacggcagtcggactatgcatattcctggcctactcgaccactgcgcaggtggcacatctgctgggagcgggtcgtcgtcgcgagggactgcaggcaggcattgatggcctgtggctggccttgagcatcggcaccgtactgggattgggattgttcgcggctgccgagccattatgccgggcactgggcggtcagggcgaagtattggaacaagccgtgacctatacgcgcgcaatcgtgctgggtgcgccaggcatgctgatggtatatgcggcgaacggcattttccgaggattgcagaaggttcgtatcacgctgatcgctgcggtgggcggcgcggtggtgaacacggtgcttgatgtgttgttcgttattgtgctgaattggggcattgccggctccggagtggcgacgctggtagctcagtggttcatggggctgttcctggtaatccccgccattctgtggtcccgggcggatggtgcgagtctgcggcctcgtttggccggtattgcggcagccgggggcgacggactgccattgttcattcgcacattggcgattcgtgcggccatggtgactacggtcgcctgtgccgcgcgcatgggtactgccgtgttggccgggttccaggccgtgaactcctcttggaattttgcgatgaacatgctggattccgtgggcatcgccggccagacgctggtggccacagcgctgggcgctggcagcgtgcagcaggcgcggcggctgacgcgggcgaccgggcgtgcgggactggtcaccggcgcggtaatcggcacggcttttgcggtagtcggcctgttcgccgggcacttcttctcccctacgccacatattcagacgctgatcgccgtgggcatggtgacgatgggcatcttcttcccactgcaaggctggatgatggcaatcgacggcattcttatcggcgcgcgcgactaccgctatctggccgtcacatgcacgctgaccgccgtggtgtatgtgacgctcatactcatactggccaatatggtgacgccggcgctgacgagcgacctgatgcgtaccgccgtactctgggccgcgttcaacgtggtgctcatgggtgggcgcggtctgtccaacggactacgcgtgcgctcggacgcatggatgaggtaggtatcggccgcgcgaagcgctgggcgattccgtttacatagcggcgcgggcggcggaatacatgccgcggacgatttgttcgcgccacttggaccagccgtattgcttggtgatggtctcaccggcggtggcaccgagcgaggagccgtcggcccgggtcaggtcgaacagcatatccagcagcatcttgtcgtggtgcaagcggtcggccaactcctccgccacggccggatcataggggtccttacccgtggcaaattcggatagcgtcaaatgctcacgcaccagcacggtagcccagtcgacgatgtccggcgcgtagcccatacgcttgagaatcaccggcacatggcgggcaccctcggcggcgtgatcggccacgaacgcgcgcttgccgatgtcgtgggtgataccggccaacagcaatgccttgaaatgatcgtcatcgtaccgtccaccggacggtgtctcacgacccagacgcgacgtgacctccaccatatgccgatcgatggtgtaccggtgggcggccgaggcggacggacggttgcggacgccgagccattccggcatccatcgacccggaatgtccacgaaatcgatgctctcccacacttccataagattcgatccgcacgcaagcagacggataaacagctcgcgcgattcgtcatcccactggttgtcgtgaatcgggcagcgcttcagattaaccaaggtagacgggttgatgggaagaccgaattcgccggccgccacggccatacgcaacgccagcttggcatccttggcaggctcggcaccgggcgccaacaccaattcgccttcgtgcttggccacgccgggagccaccacgtcgaattgcggggcttcgcgcttgccaccagagcgctgagagaacatctggaagaacgcgaatcgcggcttttcgtgggtcagcgaatgttcggcgcgggaagcggtggaatcaagcgagaaggagatgcgccgaccgatacgggcaagcagcgtctgcagatcgtcgatcgagtaggcggcacgctcgttttcgggccaagtcggatcggcaaggccaagcatggcagccactttggcctgatagggcgtcagcatcaggttggtatccttgccggccaccagatggatgcagtcgcgtacgtcgagcagacgttccacagcttcgtcgtaaatgccgtgcgggcggtcggccagccatgaggcggcgagcgcggagacgagcaccgaatcgcgcaaccccccacgggcctctttgatgtcgggctgattgacgtattggagccgaccgaattcgtcgagtcgggctttggcggagtcgagcagttcgggcaggcgcttgcgggcggccttgcgccagcgttcgaggatggacgtggcggtggtggtgatcagagcggtgtcgccggcgatgggcttcacgtccagccagcccatggcggcgggaaggtcatggtcggtgacctcctcgcattgggcgcgcgtgcggatggagtggtcgaggtccagaccgctgtcccatagcgggtaccagagtttgttggccaactcgttgagctgctggtcgttcaacgtgcgaggctcgtagatgatgaccaggtcgaggtcggagctggggcccagttggccacgtgccagcgagcctaccgcggcgaagccgatgccggagtcgggcacagggaaagagacatccttgcaggccgcattccacagctccgtgaggcattgcatggccagttccgtgcgagctttgcgcttggtcgcaccattccggtagacgccgtcgtcatccggctggctcatatccatgaatcgttgtttcaagccatcgactgctgaagtcattgcttcatctttcattgccaaaaaggtccccgcacggcgtcaattcgcggcgagcggggacctttcctatgcagtccatccccttctaggcatggacgtctgtgttatcagatcgcggcggaaccggtctcaccggtacgcacgcgggccacggagtccagcggagcgacccacaccttgccgtcaccgatggtgccggtgccggcggacttgatgatcacaccgaccagcgtctcggcatccgcgtcatcggacagcacttcaacgcgaatcttcggaatcaggtccacagtgtattcagcgccacggtagacctcggtgtggccgcgctggcggccgtagccgttggcctcggacacggtcagaccgtgcacgccggcggccgcgagggcctccttgacatcgtcgagcttatggggctgaatgatagcggtgatcagcttcatttcacttcacctccttgagaacggagctggcagtaccagcaaaatcgtaagcacgttcgccctggtcggcaagatcgatgccgccgacttcctgagcttcggtgacgcgccaaccgatggtcttctccagagcgaaggcgatgatcgcggtgatcactgcggagtagaggatggcgacgagagcgatgaccagctgaacgacgagctgcttccagtcgccaccagccagcagaccggtgccttcaccgaagaagccgatgaggatggtgccggtgaaaccaccaacgccatgcacgccgacaacgtcgagggagtcatcgtagccgaacttgaacttgagaccgcaggccaggcaggtcaggacaccagcgatggcacccatcacgatggcccacagcggggaaaccacatcggcggccggggtgatggcgaccaggccggcgaccatacccgaggcggcacccatggcggtgtagtgaccggagcgaatcttctcggtgaagccccaagagagcattgcggctgcggtggcggcggaggtggaaacccaagcgtaaccagcagtaccgttggcggcgaaggcggaaccagcgttgaagccgaaccagccgaaccacagcaggaaggcgccgagcatcacgaacggcacgttgtgcgggcggaacggctgcgtgccgaagcccttacgcttgccgatgatgagcacgatgatcagggcggcgactgcggcgttgatgtggacgacagtaccacctgcgaaatcgtgggcggccgcgccgatggccttggagatggcgccgtcagcagacagcagaccaccgttccagaccatgtgggccataggagcgtagtcgaaggtgacccacagcgccacgaaaatcatccaggtgctgtacttcacacgctcggcaatggcgccgcagatcaggccgacggtaatcatcgcgaaagcgacctggaaggcgacgtccacggaaaccgggtagttgttgccgttcagaccggtggcggtgaacacgccgtcctgggcgaccatggagtccttcagcaggaagccgctggccgggtcgccgaagatgcctccgatgtcggaaccggcgtaagcaatcgaccaaccccacagggtccagacaatcatggtgaccgacagggcggccgcctcaagcatcagcatgttcaggacggccttggcacgaaccataccgccgtagaagaacgccacaccaggcgtcatgaggaaaaccaaggacgcggatgtcaggatccatgcggtgttaccggaatcaatcgctcccatgtctacctccctctctttcgttcagggcaccgggggctttgcgcggccggcgtcgactttgtctctacaatgccgtcccccttgtgggggctaacagttcgtcagtaaaagccggtctcgttttggtttcgttacggcaagttacgcgattgttaagcgcacctgacagttaggttggcatcggatgggctgattccggcatgattccaacggatatgggaaagccccgaatcatgtttcgaatatgcttcggggctaggtttggtgcgttgcgggcgtttcccgcgcccacaacgtggacggacgcagggctcccctcgctgaggggagctgtcgagcaaagcgagactgagaagaactcgaccgtctacgcgagaatgccgtccacgaaaccttcgggatcgaaaggtgccaaatcgtccggaccttcaccaagaccgacgagcttgaccggcacgccgagctccttctgcacgctgaccacgatgccgcccttggcggaaccgtcaagcttggagagcaccacaccggtaatgccgatggcttcggcgaacaccttggcctgggccatgccgttttggccggtggtggcgtcgagcacaagcagcacttcatccaccggcaggttcttttcggtaacacggcgaatcttgccgagctcgtccatcaggttcgacttgttctgcagtcggccggcagtatcgatgatgagcacgtccgcgttcgcttccttggccttggcggatgcctcaaaggcgacggatgccgggtcggcaccgtccttgtcggagcggacgacgggcacattgacgcgtgcgccccaggtttcgagctggtcggcggcggccgcgcggaaggtgtcggccgcgcccatcatgacctgcttgttttcggccacgaacagtcgagccagtttgccggcagtggtggtcttgccggtgccgttgacgccgaccatgatgatgacgctgggcttggcggcacccggcttttcggcattgaggcggcggtccgtatctcgaccgaccagatcgagcagcttctccttgagcgtggcgcgtacttcggctgggtcggctttaccagtgatgcgggcgtcggttctcaggtcatcgaccagttgggcggaagcatccgcaccgacgtcggcaagcagcagtgtgtcttcgacgtcttcccaatcggcctcggagagattgtctttggcgaggatgtcgaacagggccttgccgaacgggttgccggacttggcaagttttgccttgagtcgggtcagtcgagagccgaccgattcgggggtttcaggtttggcgggagtgggcttggaggcaggttgggactcgggcttgggcgcagctgccggttcgggttcggcctgcgcggctggcgcaggctcggctttggccgattcggctgacttggccggctcggcggcagtcgcagccttagcttcctcggcttcggcggccagccgagcgtcggcggcggccttggcgtcgcgggtcttcttgttgtcgggggcaaccttgcccatcgcacgatccaaatcgcgcttgcgggacttgcccaaccagatgctcagggcgattacgataaccgccgccacaatcacgccaagaacggcgagcacagtattcatatccatacctgtcaagtctagcccgcagatggaatcccctacgaattcggcagtctcaggccgacaattccacccggcgacttaagctgaaccgcatggcacattcttcacgtatgacgtcgctgcagcgccgcgagcagctgattgaagtcggacgctcgctattcgccgccaaaggcttcgaagcggtaagcgtggaggaaatcgccgcgcacgccaaagtctccaagccgattgtgtatgagcatttcggcggcaaagagggcctgtatgccgtcattgtggatcgtgagatgcgcgcgctgaccggtacgctgaccgccgcgctcgacgatccgaccgtgcacccgcgccagattgtggaacgcacggcgcttgcgctcctcacctatatcgaagagaatgccgaggggttccaggtactggtacgcgactcgccgagcaccgacccgtccggctcattcagctcgctgatgggagacatcgccgtacgcgttgaagacattctttccgaaacattcaaacggcagaagctgtctgccaagggcgtgccgtactacgcgcagatgctggtgggcatgaccgtattcaccgggcagtactgggccgaccggccaaaggtgagcaaggagcagctggctgcatacattgtggatttggcctggcatggcctgagccggcttgactccaagccccagttgttctttgagggcgccaaggcgcggaaggaggccgagcgccgagccaagcgcgagtccgattccggcagcccggattcagaccagacgagttctgcccaatcggatcccgagcacgccaccggggaagattcagggttgcagaacatgcgttcaggggcacaggttacgcaacactctgccgagtcgggaggcgaagtgctacggtttgaacaggaaactgaacataacgactaaatatgtgaggacgtaagactttcatggccagcacggcaaagacgctcacctttgtgatccccgcatacaatatggagtcctaccttgaccgttgcgtgaactcgctgctttcggcaagcgacatcagcgacctcgaggtgctgattgtggacgacggttcgaaagacggcacgctggagtacgcgcgcaagctggaacgcaccaatccgggcgccgtgcgcgcgattcatcaggagaacaagggccacggcggcgcggtgaacaccggtatcgcggcggcgaccggcatgtacgtcaaagtggtggatgcggatgattgggtcgacccgcaggccatcgacacggttctggccacgttgcgtgcacagcatgacaccgacgaaccgattgacatgctggtgaccaattacgtgtatgacaaggtggccaagcgtcacaagaccgtagtgaacttccgccgtgtaatggaggccggccgcgtgctcggctgggatgacctgggcaagttcggtctggcgcagtacatcatcatgcatgcgctcaccttccgcacgcaggtggtgcgcgattccgggctgaagctgccggagcacacgttctacgtcgatttctattactcgtaccagccgttcccgtgggtgaagcgcatccagtacctcgatgtgccgttctaccactacttcatcgggcgcgagggtcagagcgtgcagaccgacgtgatgattaagcgtgtggaccagttgcggctcgtcaatcggctgatgaccgaggccacgcccgaacgcggtacggtgccggaggggctgtaccggtacatgattcacttcctggcgatcgaatcgtgcgttacctcgacgttcctgattctctcgcgcgatccggccaactacgttaagaaaaccgagctgtgggatgcgattgacgcctattcgccggccatcggcaaggatgtgcgctcgcagctgatgtcccgcgcgctcaatctgcccggcaaaaccggccgctggatcgtgcgcaacggctatctcatcgccaaacgcatcgtcggctttaactgattcggattgtggttttgccctgctgacgcgttatcagcagggcatccctattacctccccagtcgaggttttgctactcggcccaacggtcggacatcgcgaagctgttgtgcatcaggttgctggaggtgtatagcacgtcgttcagcagcttggttgtgtgctcgcgcaggtagtcggccatctcgtcgttggccgcttcgagcacatccgccacgccctgcacatccttctcatcgccgtggccgccatcgagcggccatgcattcgtatccgtcgattcggcatcgcttcgagcaagcaactgctcatccgtgcgctcgatgagccggtgtccgaacgcgcgcacgccctcggcatacccttcgatgaaccggttcgtctcataccagtgtgcgtcggccacgacggcgatcaggcggttcgtccaatacaggttgccggtggagacttcgggcgtggtgtcgcgcaggtaggcaggcgtgtcgttgacgttcgcgtagaacggcgcggcggcggtgaacggaccagagccgaacgatacccacatcaccgtgcgattggccgccggcacatacggacggacctgaatcgccaccatatggccggtgcggttcacgccgatcggacggtaacggtggcgcgattccgccgtgccggtcgtgccgtacgggtcgtacggcgtgccttcgaagtgcgaggacagcaggaaatcaacgtcttcgaggctcaccttgtcttccggcacgcggcaccacgggatgtcgtcggattcgggcgtgtagcgggcggccggcgaatcccagtcctcgctggggttgaggcggcgttgcatgtaccaggcacgcggcgtgttgtagatatggtccttcggcgtcgcggtgccgaaggccttgcgcgggttgaaacgggtgggaagggcaacggttgttccgaatccggcgctatgcgcgtgacggccgttggaagagaccggcgttcccattgtgcggtcgaggtgatgcgtggccatgaactcgcgcaggtcggcgctgcataggtattcgcgctgctcgccgaacgcatcggcgaggtcgaagtcgtcgatgccgagctggttggggatcgtggcatagcagtcatcgggcactcggcgggcgatccaatggtggccgccgatggtctcgacgtaccagatctcgtccacatccgaaataatcacgccgttcgattcgtaggtgccgtaggtttcgagcagttcgcccaaccgcgcgacgccctcgcgcgcggtggtgacatacggcagcacaagggtgatgatgtcttcctcaccgataccgccgggctgctcggcctgataatcggtgctgtccggttcgccgacagccggccgcaactcgaccatcgggtccgcaccgagcacgcgctcgttgacagcgatggtttcggtggcgctcatcgccacgttgtgttcgttggcaccggcttcggccagaatgccacgattattcagcacgttcggtgcgatggtgtaccggcaaggattgtccggtagttcgatttcgacatggctcagcacgctgcggtagtggcgcggctggtcgtcgggggcgacagcgacgaagcgcttgggatcgtaacggcccgagcccgaatcgtcatcgcgggcgatgatggtggaaccgtcgtaactggcatttttgccgacaagaatcgtggtgcatgacatgggacaccactctaggagccaggctggtcgaaacaaaaaaatccttggaaccattgcgattccgaggatttgttgtgccccctgtgggattcgaacccacaacccacgacttaaaaggacgctgctctaaccgttgagctaaaggggcaactcttctaaaatacacaccgttttgggatatttcaactacggcgttgcgtacacgtttgcgtacgcgattggcccaacgcacggcacagcacacgcaatgtggcccaaatcgcagcccaaatcgcatatcgcctctagcgatagatagccgccggcgactacccttgtacattatgagtgaatcccccaattggagcaatcccctgcgcgactcgcgcgacctcagactgccccgtatcgccggcccatgcagcctcgtcattttcggtgtcacgggcgatctggcacaaaagaaactgctgccagccgtctacgacctggcgaaccgtggcctactgccgccgagcttcggtctgaccggcttcgcccgccgcgactggacacaggaacggttcatcgaattcgtcaaggccgccgtccaggcgcattgccgtacgccgttcaaggagtcgacttggcgcaatctggccgccggcatccgcttcgtgcagggtacgttcgacgacccggaggccttcgagcgcctgagcgccaccgtgcaggagcttgaccgcgaccgcggcacgcagggtaaccatgccttctacatgtcggtgccgccgcgcgcattcccacaggtcgccaagcagctggccgcctccggcctgtcgcgctcgtccgagggcgcatggcgccgcgtgatcatcgagaagccgttcggccatgatctggccagcgccaaggaactcgacagcgtggtatccgaagtgttcgacccgagctccgtgttccgcatcgaccactacctcggcaaggaaaccgtgcagaacctgctggccctgcgtttcgccaacgccatgtacgagccgatctggaacgccaactatgtggaccacgtgcagatcacgatggccgaggacatcggcatcggcggccgcgccggctattacgacggcatcggcgccgcacgcgacgtcatccagaaccacctgcttcagctcatggctctgaccgccatggaggagccggtgagcttcaccgccaaggacctgaccgccgaaaagaccaaggtgctttccgccgtgcgcctgcccaaggacctcgccgccaacaccgcgcgcggccagtacgccaagggctggcagggctcgcacgaagtggtcggctacttggaggaaaaaggcatcgaccccaagagcaccactgaaacgtacgccgccatccgcctcgatatcgacacccgccgctgggctggcgtgccgttctacctgcgttgcggcaagcgcctcggcaagcgtgtaaccgaaatcgccgtggtgttcaagcgcgccccgcatctgccgttcgagcagaccgccgtgcgcgaactcggcaagaacgccatcgtgattcgcgtgcagcccgacgagggcgtcaccatgcgcttcggagccaaggtgccgggcggctccaccatggaggtccgtgacgtgaacatggacttcagctacggccgctccttcaccgagaactcgccggaagcctatgagcgactgattctggacgtgctgctcggtgatccgccgttgttcccgaccaccgaagaggtgaacctcagctgggagatcctcgatccgattgaacaattctggtccacgcttggccagccgcaggcctaccgcgccggtacgtggggtccggcacaggccgacgaaatgctggcgcgcgacggccgccactggaggatgccatgatcatcgatatgccgaacacccgcacccgcgagattgcgcacaaaatcgaacagctgcacgaggagcgcggcgaatcggcgaccggccgcgtgctgacgctgctcatcgccaccgaggacgcggacctagagcatgcgctggaaatcgcgaactcggccagccgtgagcacccgtgccgcgtgattgccgtagtaccggataccaatcctgccgatcagtccggcgaaggcgaaccgaacgcggccgaagtggccgccgaggtgagcgcgagtcgcgataatccggccgtcgatttgaccgacggcccgaacgatccgaacgattccaacctgaacgcccaagtgcgattcggcgcggacgccggtgccggtgagatcatcatcttgcgtccgcgcggtggccttatcaaccacccggatacgctggttatcccgctgcttgtgccggatgcgcctgtagtggcgtggtggccgaccacaccgccgtcgaacccggccaaggatctgatgggtgcgatggcccgcagtcgcatcaccgacgcgttgcactccaataatccggaggccacgattgagcgtttgcgccgcaattggacaccggaagatatcgacttgtcctggacacgactgaccgtctggcgcgcaatgctcgcctcgatgctcgatcagccgccgcacctgcccatcaccgccgcgaaggtgaccggcaaggccgacttcctgcctatggaaatgctgtgcgcatggctgcgtctgaaactcggcgtaccagtcgaaactgagttcgtgcccgacgcgcaggccgtgaccggcgtgtacctgacccgtgaggacggtgtgatctcgctggaacgcccgtatgaggaccaagcgctgatctcgctgcccggccagactccgcaggaagtgtccgtgccgatgcgcaccatcgaggactgcctgaccgaggaactgcgtcgcatcgatcccgatgagatctacgccgaggtcatcaacgaaggctgggatctgattcgtcactgaagtcggtagaacccgttgccacagcggcgttggaatgagttcggcaattgtggccgagccatgccaacgccgttgctcatcgtttcctacctcatgcgatgccgaagctcatgcccgcggagtaataaagtgacatatgcgatgtcgcacaatgtggattgtgttgtcaactgacaacacaatccacattgcaaagtacgacacataccccatacaaggaccatacatggcaactcgaaaactcattgtgtatccgaataaagatctgatgattcaggctggcgcgcaacgttttgtcttggcgctactcgatttgctcgccgaacgattgcctgatggcacgcatcgcacgcgtgtggatgtggcgctgtctggcggttcggccgcgcagccgctgggcttggtgctgaacgatccgctggctgacgcgattgattggtcgcgcgtgcatttctggtggagcgacgaacgttttgtgccggcttacgacaccgatcgcaatgctttggaggcccgtcgcctgctgcttgaccagctggtggcagatggcaagctgcctgagtcgaatattcatgagatggcggccgatacccgttcagccgatgacatcgccgatgtgatggatcaggccgacagcgatgatgcttccgttcgcgccgccgccgatgccgcgaatgatgcgttgctggacgatgtcgcgagcgactatgagcgcgagttggtgaatgaattggggccggaaccggtaatcgatctgatgattctcggcatgggaccggacggtcactatgcgtcgctgttccctggtcatgatgaggtcaaggttactgataggctcaccgtgggtgtgaaccactcccccaagatgccgccgctgcgtgtttcattgaccgcgccgctcatcgcgcgttcacgccatacgtggttcttcgccgccggtgccggcaaagccgaatcgctggcccatgtcttcgagcagcccaacaaaccggattacccgtcctcctacgccaacggagtggacgagttcatctggttctccaccgaagaaaccgtcaccgagttgtgagtgaattaagccccctctgatgagggggcttaattcgtctatggctacgcctcaatctcggacttgccctcttcgccgccggcccctgcaattagggactcgcctgcggcgaggctcagtgttggctcggcggcatagccgcctcgctccgaagagggccggggagcccaccgggctcccctaagcccgagatcgcgaggctacgcctcgatctcggacttgctgttttctcagctcggctatcgccgagcctgaagaaggccggacagcccacagggctgtcctaaacctgaaatcacgaggctacgcctcgatttcaggcttgccttcttcagcccacagcgtgtggaacacgccgggcttgtctacgcggccgtaggtgtgggcaccgaagaagtcacgctgggactgggtcagagcggtaggcaggcgcttggagcgcagaccatcgtagtacgccagggagctggagaacaccggggtcgggataccggcctccacggcacgcacgattacacgacgccatgcatcctgcgattcgccgatgatcttctcgaagtacggatcgaacagcagggaagccggcgggttatcgcccctgaaggcctcggtgatgcggtcgagcaggaactgggcgcgaataatgcagccgccacgccaaatgcgggccacttcggacaggttgatatcccagccgtattccttggcaccgtcctgaatctcgttcaggccctgagcataggccacgaccttggaagcgaacagagccttgcgcacgtcctcgacgaacgcggccttgtcttctccggccagatcgatggtcttgttcggtccagccagaccttccttctgagcgtcttcacgcagctcaccgtgcgaagacagtgcacgagcgaacacggcttcaccgatggcagccacaggagaaccacattccagaccagtctgcacggtccacgtaccagtacccttcatgccggcatgatccacgaccacgtccacgaacggcttgccggtctcggcatccttgtggtgcagaatctcagcggtgatctcgatcaggtaggagtcaaggtcgcccttgttccattcagcgaacacgtcgccaatctcctcggcatccatgccgagtccacggcgcagaatgtcatacgcctcaccaatcacctgcatatcggcatactcgatgccgttgtgcaccatcttgacaaagtggccggcaccatcggtgccgatgtgggtcacgcacggttcgccgttcaccttggcggcgatggactgaagaatcgggcccaaggtcttccaggattccgcagtgccaccgggcatcagagacgggccgttgagcgcgccttcctcaccaccggacacgccgcaacccacgaagtggaagcccttggcacgtacttccttctcacgcttgatggtgtccttgaagaaggagttgccaccgtcgacgatgatgtcgcccggttcgaacacctcttccagctgcgcgatggtcgcgtcggtcggagcaccggccttgaccatgatgatggcggtacgcggacgcttcagggacgcggcgaattcctcgagcgtttcggccggcacgaagttgccttcggtgccatgctcgttcatgagcttctcggtacgcgagtagtggcggttgaacaacgccaccgtgttgccatggtgcgccagattacgcgccagattggagcccatcgtggccagtccaatcacaccaatgtttgctgtagcttcggccatgtgccttgcctttcgtttgattgtcccatcgtcatcacgcgcgtcacaaaacagcgcatcagcggagggaatcattccttcaacgcttgaaagtgtatcccgcttaccacccacacgcgagggctgtcttaggttctacgcaccttctgcccgcgaagcgtaattacttgccggccattcacatacgcccggccttggaagggtcgatatgcatggtctggaagcgattggccatgtaagcgtcgctgtagcgttcgctgaaccacatcgcgaccggtgaatcctgcggctggccggccatgcgcccataccagcaatccaaggccatcagcgtgaaggcaatgtcgatcaccatcagcaccgtgcataccgcagtcagcgaataccgcactttccatggaatgcgattaatcagagccagcagtcgcggtaacagccacttgacccacaccacaccaatcagtccccagaagaacatgaattggcccgaagtacgtccgtcgatggacagccaacggccggtgtaatcccacgcggtaataccaaacgccgcttccatgaaccagctggtgcaatattcgaacgcgccgccgatcaccgccgaagcgcagaaaatcaagaacggattcgccttccacagacgattcaggcacacggttaccaataccgcaccacagccgtaaatcggcgagaacgggccccacagcaaaccagcgcggtcctgaagttcaccgttatacagcgccatatggtagatcgtctccacaatcaggccacccaccgaagcgatggtaaacagccagaagatattgaaaaagtccagcgcaatatagcccttgccggactggtcgcggcctagcatgccggccgccacagccgattcataatcatcgcgatcgtccatacgcctgagcgcgcgccgcagacggcgttcctcgctcagggagggatcggcggtcaccgaaatcacgacgagaataatcatctgaatcagcggcagcagcaggttgaagccaaggccggtcagggccagcgacagcatgccgtcggccaacgtcaacggcatcagcacgtaggtccagcgcgcggcataccggcgatgattgcgcagcagcatcacgccgagcacaatcaggcatgcggcactgactaccagcaccaccgcatgaatcgcggacaggatgaaggtcaggctcatcgcatcgacgtgcacatgaccatccagaatctcgcgcacggcatagaggatggaaatcaccataatcggcaatgtggcgagtccgtccagcagcacgaccgcgccatagatgcgcgccagaatcggtaatcgcttggcgttcaggttcaagccggcgtcgtccagttcgacggccaccagatcggccacgactgcggactcggcgtcacggttctcccgcagcttgccgggggtagtggccgtgccatcgtccttgaattcaaccatggtttcctccccacatagcgtcccctcaccctatcacccgattgcggttttgctgaacttgatgggcggtcggtacatgtctgtctacattgccgagcaccgagcctatccatcgcgttcaggaaacgtccaaaaaccatccagaaatcttgtcaataagttccagaacgcctttcgctctgcccagcgacacacgataagccgctgggcagcagcgttattccgccaaaaacatcatcaatcaccccattaatctccggcagccgtattacgctactacaaacgtagcgctacgattaacgtatcgctacggaaaacgtagcaaccaagcaacaccaagctccggaggtatcagtgggcaatatcttcaaggtcctcagacgcgacttcctgcgcctgttcaaggtgccggccgcatgggtgatcctgttcggcatggtgttcatcccgccactgtattcgtggtacaacatcgtcggcttctgggacccgtacggcaataccaaaggcatcaccgtcgccatcgccaacaatgacgacggcaccgacaacgcgctcatcggcaagcagaacctcggcgatcaaatcgtcaagcagatgagaagcaacgaccagctcggctggaccttcgtcaccgaagccgaggccatggaccaagtggaatccggcaaggcatacgcagccatcatcattcccaaagacttttccgacgatctcgccggcgtggtgaccggcggcaagagtcggcccactctggagtattacgtcaacgaaaaagccagcgccatcgcccccaaagtcaccgacgtcggcgcgtccactgtggaccgcacggtcaattccacattcgtctccaccgtatccgaagtacttaccgaagtcatcaatacggttgacggcaaagccatcagtaccgaagacaccaccaaagccaaggccctcacggcccttgccaaggcctccgacgatgtgcagcacacacgcagcaccatcgccaagctcaccaccaaactcaccgacaccccagagcagacacgcaccgcacgtcaggcgctggacgacgcgcgcacacttggcatcgacactgcagaaggtctggccggcgtctccaccctgatcggcactacccagaccagtctgaacggcttcgtcacctccacgtccgaagcgcttgaccaaggctcaagcctgctgagccaagccgcagcacaggccaaccaaagcgtgggcacggtaaccggaaccatcagcgccgccaatcagcaggtaggcggactgatcaatacggcggaagacatcaaccaagcgaacgccgacatcatcgaccaactcaaagggctgccgaacgccaatcgagaaccgctgcaatccgccattgccacactggaaagccgcaatagcgagcttgccggcgcactgggcaacctcgatagcctgaacaccactatcggcaatgcctccacagacaccgccggattggcgcagcatctcaataccgccacccaaaccacggtgcgcgaggccaataccgctcgcggcaccatcacctccggcgccattcctcagctcaacaccggtctcaacgccctcagctcgaccgccagcactctgtcgaccggcatcacgtcgcaaggctcactcatcgatcagtcgaagcatgccctcgaccaactcgacaaagcagcctccaccacggtgaccgcgctgcgcgacaccgataaggcgctggccggcgtacaaaccaagctcgatacgctggtcaccgacatcaaagccctgagcatctccagttcactcagttccctgatcggcaccgacggcaaactggatgccgccacaatcgccgacttcatgctctcccccactgttatcagcgaacaggccgtctatccggtcgcctcctatggttccggcatggcaccgctgttcaccaccctgtctttgtgggtgggcgcgttcgtgctcgtggtcattcccaaactcgaaaccgatgatgagggcatcgacgatctcacgccaacccaaggctatctcggtcgcttcctgctgctggccacgctggctgccgtccaaggcctggtcacggccatcggcgatcttgtcatcggcattcaatgcgcgagcgccccagtgtttctgctcacctgcgtcatcacctcactggtgtatatgtcggtgattttcgccctctccaccacgttcatgcacgtgggcaaaggcgtatgcgtggcgctggtcattctgcaggtgccgggcgcctccggcctgtacccgattgaaatgatgcccgcgttcttccgcgccatctacccgctgctgccgttcacctattcgattgacgcgatgcgtgaaaccatcggcggcttctacgacggcctctggttcgtctatatcggcaaattgctggttttcgcggttctggcctttgcgattggcctcggcgcccggccgaaactggccaatctcaaccgcctgttcgcgcgggaaatcaaggaaagcgacatgattatcggcgagccggtgcacctgcccggcagcgaataccgtgtcactcaggccattgcagcactggccgaccgcgacgaataccgtcatgccatcgaacgtcgggccgccaaattcgcctaccagtatccccggctgctgctgggtgcgcttatcgccggattcgtggtgccggccgcgctcattatcgtgtttgcgctgaccaccagcgagaaaatcgtagtcatgggcacatggctggcatgggtgctcatcatcatgggcttcctgatggtcgtggaattcatgcgcgattccatccgccgccaaaccgagctcggcagcctctccgacgagtcgatccgcgccatgctgtacgggcataaggccaagcgtcgcgacacctccgccgaacgccacgaagaagcggacccgagcgccgctgttaccgcaatcatccccactattccgccgaccaaggaaggcaggcacgcacgatgaacaccatgtggaaactgtttaccggcgacatcaaacgcctgaccagcaacgtggtctccatcatcatcgtgatcggcttggtgatgattcccggcctgttcacctggttcaacgtggccgcatgctgggacccgttctcgaatatgaagaacctgaaattcgcggtggcgaatgtggatgaggggtatcgttccgacctgatcccggtgaaagtcacggtcggcgatcaggtggtgaacgcgctgcgcgccaacagtcagctcgattggacgatcacgtccaaagccgatgccgtcgagggcgcacgatccggcaaatactacgcggccatcgtaattccgaagtcgttcagcaaagacatgatgaccttcttctccgacgacgtgcagcatgccgaactgacctattaccgcaacgagaagaagaacgcgctggcaccgaatctgctcaacgagggcacggatgaggttgcggcggaaatcaacaccacgttcgctaagaccatcacttcggccgggctggaaatcgcgtcttcgctggccgatcagctgtccaagcccgaggccaaagagcaactgaataccttcaacgccaacatcgccaatttcgccacacagcttgacgatactgcggatctgcttggcacatacagcgcattgaccgatacggccggcgccttgctcgacacctcgaactcactgatcactcaggtttcctctgccgccaaacaaggcggcaaggatcttgccagcgccaaacaggaagtcaccgacgtggccggagccctgggcaccaccgctgacgcgatgagcagcgcactggacgcgagcgcctccagtttcggcgcggtgtccgactccatagacaagctgtattccgacgcgaatgctggtgccaccacggccgccgacgaatcggaccgtcaagccacggccattggcaagcagacggagaaatacactgaaattcgcaacacgttggccggcatactgggcaacgactcatccatcatcacggcgatcgaccgttcaatcgcacggcaaaacaggctgcgacaagcgctgaatacggcggcgaccgatattcgccaaggcaatcaggacgcgcaggatcagcatgcgcaggtcaagaatctggctgatcaagcacagaacagtattgccaatatcaagtcagatttctcggccacggtgaaaccgcaaatcgactccctgtcgtccacagtctctgacgcctccggcatactgagttccggcgccacccagttggactccacgctcggcgacctgaagggaacttccgacgacgccagcgatatgctcagtgacgctcgcactaccttggacaaggtgtccggcaaactgcgttccgccggcgccgaactggcttcgttcaacagcacactgagcgacgcactaaacagtggcgatatgggcatggtcaaagaggtgctgggcaatgatcccgaaacgctggccagtacgttggccgcaccggtgcagctcaggcgcaaggccgtattcccggtggcgaatttcggttcgtcgatggcaccgttctacacgctgctgccgctgtgggtgggcgcgctgctgatggtggtgacgctgaaaaccaccgtgtctcgccggacgcgcaaagcattgggcgatccgcggccgcatcggctcttccttgggcattacggggtgttcgcgctgattgcgctgctgcaatccacggtgtcgctcggtggcgatttgctgttcctgcgcgtgcaggccgtgcatccgctgctgtttatgttgtctggatggctggcctcgctggtgttctcgttcttcacctatacgatggtggtgagtttcggcaatgtgggtaaggcaatcggcgtgcttatgctcatcgtgcagatttcgggtgcgaacgctgcctacccggtgcagatgttgcccgacttcatcgccaaagtcagtccgctcttgccgctcacccatgcggtgacgatgatgcgtgcggccatcgccggcatctacgacatggattactggcgggccgccggaatgctgctggcattcgtgccgccgctactgttgcttgggctgttgctcaggaagccactggtgcggttcaaccagtggtatgtagcccaagtcgagagcactaaagtgctgagctagtaggtattatccgggagttgcctacaaacggcatggacttaccaccctcagtctggctttgccagccagctctcgccagcgggagtgtacgggagcatatttcgaagagaagagatgacggagatgacagatacgacggcgacaccgcgcggtgagcgcacgcgcgaggcgacggatcgcaagctcatgcgagccacgctgcagattgcggtggaccgcggcatcagcggcgtgaccatcgaggaggtggcccggcgctccggtgtggccaaaaccacgatttaccgccgatatcataatgccgacgagctgctgcacgagatcagcgcgatgtatctggccatcccggatcccgacccagtgcccagccccacgcgtgagcatttcacgcaactattgcagcgattggtcgattgggtgcgcgacaacgacatcgacgtcaagcgcgtgggcattgtgttgtccagcgaggccgagttcttccagcacatcgtcgaccaggtggtgaccccgtggctggagcatgtgggagcgttcctcaagcagggagtcgcgcagggcgtgtttcgcgaggacgttgacgagaagttgctgttgtccacgattatcggatctttggtggcgtatgaggccatcgagggcaaagcaatggacgacgacaccgcctgggcctcgcgcatggccgatctgctgtggccagcattgctgaagtagcggtcttactcctgaatcgaagcctcctggcgggcgacttcgagggctttgttgaaggcgtcggaggtccaactggcgccggcgaccttgtccactttgaggcccttcagaggtttaccgtccaccacgccgttaatggctttggcgaagtcgtcctgatggttcttggaaatcgtggtgaacgggtgcccaatgatattgacggtctcgacgttgccgtccttgatggtcagatggacgtcgatggaatcctcgcctaccgggccgtactggccgttgatcgagtagttgccgtccttgtagttgccggtgtccttcttgtcggacgtggtggtggacgggtcgttgtgcgacgagctggaatcggagccgtcggagctatcggagccgttcgactgggattgcgactgctcttcctgcgacttctcggtctcgcccgagttgccggcgtacgcatcgtccatcggcgtggcctcggattcgccgcacccggccagcagcgcgccagccacgaccagtccggccgccgccaatgtcgcggatttcttcaacatattcttttcggtcatattcacgctccttaagcccccctctgacgaggggggctgtcagcgaagctgactgggggagagaccatcagcttgccatgtattcctcacatactgctcgatgcccctgacggccctactcctcgccgccggttttcgcggccttggtggggtcagcgaaaccaatggcggtctcgccgttctgcgcgccctcgacctgtgcacccgtggaggcgggcttgccgccggccgcctcgtaggccttgcgcgcatcctcgtcattccacttctcaccgacgagcacgccatggttgagcatgatctcgcgctgcgcgcagctggcgaccagcgcatcgtgggtgaccacgataatcgtggtgccctgctcgtgcagcttgcggaacaggtcgagcacgatcttctcgttcttctcgtcgaggttgccggtaggctcatcggccagaatcagcttcgggtcgttgatcagcgcgcgggccacgcacacgcgctgctgctcgccgccggagagctggccgggcaggtggtgggcgcggtccttcaggccgaccttttccagcgcctccatggcctgcttctcatcgaccaccgaatggtagtattgggccaccatcacgttttccacggcggtcaggtgcggaaccagatagaacttctggaacaccagtccgatgaggttcttgcgcacgtcggccagctgcgtggcgttcaggtcctccagcttgcggccttccagcttcacggagcccttggagggcgtgtccatgcagccaatcatgttcatcagcgtggtcttgcctgaaccggatgagccgacgatggcgagccattcgccttccggcacggtcagattgaggtcgtccacggcatgcaggtcgccgtagatcttcgagatgtggtcgagttcaagtagcatgacgtttctctttctttattcttcgcgaagcacgacggcggggtcgatgcgggtggcgcggtggacgggcgggatggaggcgacgatggcgatcagcgcgctgaacagcacggaaaccagcgccagccaccagttgaatccgatggagcgttcgaacaccgccatgcacagccaaccggcgagtccgtagccgattgcggtgccgatgaggccgccaatcaggccgtagagcgacgattcgatgtagaactcggtgccgatggcacgcgagctggcaccgagggccttgcgcaggccaatctcgttgcgtcgctgcgagacgatcgagctgattgtggtgccgacgccgacgagcgtcagcaccagcaccaccagcgagacgatccagaacagcgtctgcagcatggtgatgatgcgggtgtcggaggctgtgatcttggtgacctgctgtgccttgacgtgcatggaggtcatgtcgttgatgctggacaccaggcctgcgaggtcgctggcgccggccgaatactcgatgacgtccacgccgcgcgtgatgccggtgagcttgttgacgtcggcgttggtggcgtagatgatcgagtcttcgctgccgccggtgtccacgatgccggccacgcggaattcggtaccggaggtgtccatgatgtcactggagacacggccgtctttgggttgctggtcgatcgaggagttcgacgaagtgccgttggtgctggcgttatcggatgcacggtagccgatggtgatggcggagccgattctcaggccgatggcgtcggcgatgtcgcgtccgaccagcaccttgccgtcggtcggccacgagccgtcgaccacccagtgatggttgaggttcttgacctgcgccgcattcacgccggccatcacgtacggcgaggcgttgacgcgcacgttctcgtagcggtaggtggcgtatttcgcggaacccttggccttgaccatttcagtggtgtgctgcaccatcgccttgtcgatgccggccttgccgtcagcattggtcgattcggtgggcgtgacaatcaggttcgcgccgtacgcacgcatctcctcgttcatctgctgcggcacggcgaggcagatcatcgccagacagaacagtgtggctgcgccgaccagcgacgccaccacagccatcaccgcgcgcgaacgccgacggaacacggcgctgaacagcattctgaagaacataccggtgttggtcatcggttccctccttccacacctacgtagataaactcagcgaccatggagcacctccgcgggcttgagattcagaatcgaacgaatcgatgaggcggacgccagcagcacggtgacagccagcagcacgaacaccagcacgaacaccatcggccgcatcgtaatgccggaaccgaacaccacccggcctatcagctgggccacgccggaaccgagcagcgcgcccacaatcgcgcccagcagcgagattgccgccgtttcggccagcatcaggcgggataccgcggcatcggtggcaccgagcgccttgagcaacgccagctcgcccgaccgttcgccgatcgaggcgaccatcaggttggccacggccacggctgcggcgatcaggctcagcacggtcatcagaatcatcacggcctgcgtcttttgcagcacattgccctgcaacgcggccacctgacgcacctgcttggccaccgcgcccggaatcacctcttcgatctgataggcgatcgagctcgggtaggcggtgcagtaccaggtctcccattcctcctggctcagcgcggccgggttcgcggcggccttacgggccaggtcgttctccggcgtggtcagggccttgacctcgattttgtcgaccgaatcgggcaggtcggcgagtacctgggccgtggaggaggcgatgtagagcgagccgttgtcctcgtcgccggaatcgtagacaccggtgagcttgattttctgctcgttcttcttgcctgaggcggtggttttgttgagggtgatggtgtcgccggtggtcacgccgagttcggaggccagcgtcttgccgatcacgccctggtcggaatcgtctttgggccacttgccgtccagctgccaccacgagcgcatgccttccacgcccacgacggtagtctcgccggtggagatcttgaggttcttgttgaaccacgtgccgacgaccggcacgttggtaccgttcaccgtggcgtggatgttgagctgcggcgcgaagctggtgatgttgaacgaccagaagatcgtcttgatcttggccgcgtccgactccttcagaaaagcggtcgggtcgctggtggacgtcgcgccgcccgactcggtgttgtacaggtcggaaacgaccgcatccgccttgggctgcacggtgatgttcgaaccgtaggtggacagctcggcgttgagcttgtcgcccacgtcgaacacgacgcccagcatcgatacggacacggtcgccgacaggcatacggtcagcgcgataagcaggcgccggcgcagctgtcgggtgaacgagcgagtaatcatgcgcagaaagaacatgattcttgtctcctgcctgactcaccggaagtgggcgctcagcgcgtccagatccgtagtttgaatggtgatcttgccgtggccggtcttgtacgggaatggtatcgggttgcagccacccttgaagccgatggtcgccaggttgatggccacctcgcacttcttgcagatgatcttgccgtccttctcgtagtagccagcgtcgccgcagttctcgcaggcgtccaggccgatgccgtacgcgccaccgttctttcggatgatgatgaagcgcatgacggtgccgtccttggccttgtattcgaagcggtgcaggtggccgtcctcgacctggctgaaggggatggtggccacgccgtccttgagcgagtaggcttccggcggcgaaagggtgatggtctgatgggtcgcggcaacgcccacggtcagggttgctgtgacgccgatggctgcgataaggctccacacggcagcggcgatggcgtggcggcggaataccttatgccggcgcaacgtggcctcgttggctcccggcacatcatgggttttcatacggaaaccggccacgatggaggccacggcgggaatcaggaacaccagcgcctgcgccataatcatcgtggagttctggttgatggaccaagccagcgccacgaacatcgtatggttcatcgggaagcctcgcgcctgcagaatctgggcaagaccagtgaagtgttgaatcagcagaatcaccatcatggccgcgacggccacggtgaacgcccagcgcacggcagtggtgcgcatcgtgcggaagatggcggccacaataatggacatggccacgccaagcaggaaaccaagagcgcgcagcagcatggccgaagtgaatgcggtctcccctggttccacccagatggtgagctgcagaatcacgtccggcagcgcgtagaacagggtgagtgcgatgtcgatggcggccacggcgttagcgatgtgcatgaacaccttgtgctgctgccaattggtggtgatgcggcgtgcgaacaccaccacgacgatggtcaggatgtcggcaatgatcgcgcaccacaacaccgggtagttgacgaacgtgcgctgattgatcacggccgaggcgcgcaggccggcgaatacgatggcggcgatcagaccgacgatcaggccgatgagacgccaatgcgagcttatcggcttatctcgcccctcgccgaccgtgagcatcacgctcaggctcatcaccagcaatgcgggggccaaagtgcccggcatcactgccacgaattgttcaagcattcgcgtcctttctctgttcaccttaggctcccctctctgaggggagctgtccgcgaagcggactgaggggagttttagaccgtcctaagaattatctccctaaagcggcgtaaagccccctctgacgagggggctttctgcttagtcaatcaccactggcgaggagtgtaatcccagttgtcgaaggtgacctcgatcggctcggtccagaagtggcccttgacgccggtctccgggtcaacgtgcagcatccaacccttggaggccggggattcgatggagagcttcagctggtaggtgccagccttgtcgagcttgacgttggcgccgtagtgcgggccatcggaagcgttcatctgcatgaaggtaccggaggtggcggtgccgccctcgacttccttgccggtggacttatcgatgatggtgtagttcacggtcagatccggcacgaagtcgcccttgccgtagccgagctcggtgcccttctggttggcatggatgtcggcctcgaggtggaaggaagcgtcagcagccttcaggcccatggaagacggctccatatcgatcggctggaagtacacagcgcccacggtcagcgggccggcgtcctgatcctgctcttcagcagtaccggacgggccaaccggaacctcttcgaaaccggcgccggaatcggaggaagaatcggaggaagaggagtcggaagactgggaggaggagtcagccttagtgtcggatgcggagttggtggaaccgcaggcagccatggacacggtcatggaaccggcgagcagcaggccgagcagagcggccagtttcttgttcttcatcattgttattcctttttctctatctctggtgaattaggattcacgcttagataattgcaattattcagttatgagataagtgcggcgtgggctggaggaattggcatcgatccgaggccgtgccgcaagtctgtcagttgtctgcagttatgggaggaaacggacgagctagacgggctacgccttcacggccgggacctcgacagtagcctgcgccttcagcttgcgctgcttgatgaagccgaccacgaacagcgcgataaccgcaacggctgcgatggcctgcgccactaggcattcgacgtacgggtagaggccaagccaatcgttcgtcggcacaccgttcaggtagaaggcgggcagcaagtcgccctcgatcagcgagtggacgccgccgccggcgaacaccaccaccagcacagacatcagaatcgaagtgaccaggaagaacggaccaatcggaatcttcacggaggtgaagcggaagagcaggaagatgccgacaagcaccaccgcggcggtcagaccaccgatccacataccgcgagtatcgcggctcatcgtgtagatggactcgtagaagatcacggtttcagcgccttcacggaacacggcgaggaagctcagcatagccagcgagaccacggttttcaacgtcacgttgtcggcacttgcggcggcttcggcatcagccacagcagcctcggtcttcttgcgaatgtaacggttccacgcttccacgctggacttgttcagcatccagttactcgtccacagcagcatgcccatggcgatcagtgcgcaggtgccttccatgatctcctgaatcgggccggagccgccgaaggcgaacacgaagatcacagccaccaagccggcgccgagcagaccgacgagcacacccaagtaaatccacttgacgaagcgcttgttatcggacttgaccaagtaggcgacgatggctgcaaccaccagcagagcttcaagaccctcacggataagcacgaggaacgcctggccggaggagctggtgaccagcttggtgaaaccgtcttccttatcggcggcaccaccgtcaagaatgccggcgtccttgatcagcatggccttgaggtcgtcgatcagcttcttggtgtctttcagggatgcgccggcgttcatggacttgcggcacatcttgaactggtattccacctgcgagacgcggttgccgctgatggcgttcatcacgttcttttcgaagccgagcttctcgtaatactggtagtacgcgttgttcacgagcgtggcgcccttggcaccatcacccttttcgtaagctttgtatgcattgtcgagaatcggggtcatttcgttggccacgtcggtccatgaacgattgcccttgcccgggttcttctttttcttggcgtcgagctccttgcgctctttggccagctgcgcctgcagcgcttcggcgtacgccttcggcttggcgagatcggcgttggtgtcgagctgctgggccgtggcgtcaagatcggcggtcaacgcatcaatctgctgagccagttgatcgtcgttgctaggcgtgtaggaaagattctgaacgctttggaatgcctgctgttgggcgagctgcttgtccgcgccaatggtgtcgtgcacgaccgcggtgaagttggaggccacgtaaatcttgttgtacgcgcccatgaaatcggaggtggcgccagcggtgttgccatccttgtacgtcttaagaccgctgttcagctgcttgtccatcgccttggagacttcggcccaggtggcgtagtcaacgctggacgagcttgatgaactggacgagctggtgctgctgtcggcgaaggccatcggagccgtgactgcaggagccacagtggcgatgaccatggcgaacagaaatacaatcgcagccaggactcgcagctgcctcacgctggtgtgttcaacggaccgaagagcagcctgggcgcgacgaaccatgcctatccctctctctctgcgcggctaagtaatcaaaaaccaactactcaatataaagaaaaacttttttgaggaacagtcttgattttttaggatttaagaggtattaggcactgtttttcgatcaattattaccgcagattgtctcaatattcgatattgtcccgctcacagatgggagacttcccgaattatgaactccccgcgactggccactccccatccctcatattgcatgaccaactgtttcaccaaggttcatagcctaaaatcactatgttgcatcacggcaagaggctggcaataattcacgcgatggcatgcgcatgttcattctggtttgcctcgggtttgctgacttgccttgagtcgctttgatttgcactggttcatcccccggtgagatcacctgttgcacacgccgtacgaacgacctgcacatcagcgcaggcactcattggtggtccttgtccacaaagcgacacgccgcagccggcactgaatgtgcatttatccgaaagctgtggtagcttattcgagttgcctacggagcttacttctagcaagcactgcagtgcatggaggattcgcctagtggtctatggcgcacgcttggaaagcgtgttggtgtaacagcctcacgagttcgaatctcgtatcctccgccctcgccggaacccttattttttctagggcttccggcttttttgtaccctcttgttttcccctctggttcctttagcgttccggttccccgtatccggcgatcacgtaccgtcaggcggcggtcgcgctggacgtgtcctacaccaccgtatggcgcacgttccgggcgatgcaggaagccaaactgatcgaacgcaccggctcggaccggcgcggcacatggcgaatccccaccccaccgcagctatcccatgaatgacgcgaagccccatcacgacacgccgcggacgcggcaaccgagacgacacggcgagcgcgcgatagtccgaaaacccaagcggcagcaggcctgagtcgccatgaaggttgggatcttgcccacacgcacaagcaccccgaaatcgttttgatttcggggtgctgcttattcggcgagcgctttccacatatcttcccgcatatacgcgcttaccaacgcacggaaatacgctcgttgatgtgcgcattctccggtgccgccgtcgcttcgtccacgatcgcaatcgcataatcggcgtagctaatggcgctttcaccggcctcgttcgcggtgaactcctcaccggccagcacatacttgccggtgcgcggcccgtcggcctggaagtcggcggccggagagacataggtccaacgcacgtcgctacgttcgcgcagctcggcgagagaatcccccatcgcggtggcgagcgggaggaacgcctccgggaagccatcggtttggctcagctgcacggtatgctccgggttgacgtacaggctaccggcacctccaaccacgatcagtcgcgcgtcagcactggagaggacgtccgcgagatgcttcaacgacgtggagtgctgcgggaaggtttccggcgtccatgcgccgaatgcgtcgacgaccacatcgaatccggcgagatctgctgcggtcaggtcgaacagatccttgatgatggcgtgctgggcgacggttttgttctccccgcgcacaacagcggtcacgtcaagtccgcgatcaacggcctccctgacaatgagctggccggacttgccgttggctgcgataactgcgatgttctgggtcatgatgggctcctatgtagtaatccattgcgcttgttacacgctgtgcctaattgatttcaacggcggaacctggtgcttccgccgttgaaacagtacgatattggagtacttactttttgggaagaaggtactttaaagtgctatagtcacctaaaaggaactattgcatgattccaacgattacacgaggtgatgctatgatcgatgtcaacacgctcccggcgtgtcccgtggagacgacgctcacactgatttccgacaaatggaaaattctcatcgtgcgcgacctgctgaccggtaccaagcgcttcagtgaactacgtcgctcaatcgggcacatctcgcagaaggtgctcacctcgaacctgcgacagatggaagccgacggacttgtgcatcgcgaggtttaccccgaagtgccgccgcgcgtcgaatactctctgaccgacactggccatagcctcaaaaccgtcatcgacgctctatggaactggggcgaagactacaaggccaagctcgccgcttgatacgccgctcaatgcggttaagcgcaatcgagaaccccgcataagagtgggacgcaactgcgatatggctcaatttgcagttgcgtcccacagccctcccagcacctcatcacaagaatggcggaattccaacaatccacactgtcccgcaactgcaaaaaggtcgattttgcgcttgcgggacgcaacaacgtgggacgcaaatgcaaatcaagccgcattgcagttgcgtcccactactgagaccgcaatgacgcttgaatgcgtcaccggattgacaacaaacctcgccatcgctatccgagccatccatcgacggctcgcacggtggcatcaacatcgttctgcgcgacggcaccgcgcaattccatgccatcgagaacagttgcgccgactacaacccgacgaatcgacgccacggtatcggccagaccactgccctcatgcgtgcagaatggagcaatggttttaccgctccaatcgcggctttccaggaatgtgtaaacgggcatcggcatatccgaccgccaaattgggtagccgaggtaaatagtctcagccgagtcaagcatcgccgcaggattatccgccccatcgccggcgaccagcgtgaacgccggccgagctcccgcagaacgctcttgcgtagcctgcgccacggcttcgtcatacacattcggatagggttcgactggcacaatctcgacggtcggcgccccaattcgcgaggcaatcacctgcgcgactttggctgtattaccgacttcgatctcaccgactgagtaattctctccagtacgagagaagtacaccactaccgcgttattgctgagcattatcgttgttctttcgctgaaatcattggatagcagcgggcgaaagctactcaaagctaccctgtgattcttcattcaccgtcgcgcccgcatctgttgcctcaacagtaaagtcagccaaacagtattacaaatgcaaaagtagaacatgaatacatgcaatatcggatataaaataagcggggaggcacacatggaactacgaatcctacgtaacttcattgccgtggtcgaggaggaaggcgtgagcgctgcggcagatgcgctgcgcatcagtcagccagcgctctcccggcaaatcaaagatttggaagacgaggtcggcgcaacattgttcgttcgcggcaaccggtcccgctcgctcgaacttactgagaagggccgcttgatgtaccgccgagcgcaggagatcgtcgagctcgccgatcgcacgcaaaaagagatgaccgccgacgaagacatcgccggcgatgtacatatcgcggcggcacaaagcgcagcgatgcgcatcgtggcacgagccatgacacgactgcggcacaagcatccgcaagtccgcgtgcggctgcacgacgactatgggcagaatatcattgaacggcttgacaatggcctggccgacttcggtgtgcttgtgcaacccaccgacatgagccgttatgatttcctgccactgccaacaggagatccgatgggcctgctcatgaggtacgaccacccgctcgccacgcgcgaatccattcatcccaaggatctcgcggatgtgccggtcatcgtcccccaaggcgtgctcaatcgccgtgatctttccggctggtacaaatcaggcaacaaagaactcaatattgtcggcacgatgaacctgttgtataacgccagctgcttcgtgcaggaaggctacggttgtgcgatctgctcgcaaggtctcgtggatacgtcgtgggagtcggggcttgtgttccagccgctcgacccgcccatgcaaacccatctggccatcgcttggaagaagagccagccgccaactccggcagccgacgcatttcttaccgaactccgctccgtcatcgccgacatcaatcgagacaacaaggagtctgtgccgtcacctcgaaacggcgcacaacgatgagttacgcttcgcctcacatacttgcgcgcgagaatcgcaaaggcgagtcggacttgcgcgatacgcaaagccatgccatgatattcagattgccataacgcagcatgccccgatagctcagtggtagagcacttccttggtaaggaagaggtcgtgagtccaattctgaactgcgccccgattgttggacgtggtttattaagggtacctgattaggctgtgggggacatgttccggaattcctccggggtgtgtccctccagtcgtatctggcggcgtttggtgttccagtggatgatgtacgcgtccagttcgttcttgaactgttcgtatgaggcgaactcgcgtccggcgtggaactcgtccttgaggtggccgaacacctgctcggtcgcggcgttgtcgatgcagttgcccttcctgctcatggactggcggatgttcagtcccgcgagccggtcgcgccaccaccggtgccggtactgccagcccatgtcggagtgcgggatcgggtcggcgtcttcgggcagcttctcctcgagcatggcgagcaggcgccgctgctgggccatgtcgggatgccggctgacgtcccaggccacgatctccttggatcccatgtcgcatacgggagccggatacgccttgccgtcggcgaccctgaactcggtgacgtccgtgcccagcttcacccacggccggtcggccgtgaagtcgcggttcagcaggttctccgccctcgcgcccgtctcgtcccggtacgagctgtatttccggtacgggttcggcctgcgtatccggcattccaggcccatgcgcctcatgaccttcagcacgctcttgtggctcacccgcaccccgaactcgtgcacgaggcacatgcgtatctgccggtggccgcacccgttgggcgtgcgcgcgaatatctcggcgaccatcggctcgaggtccggccgggtcacggcggccggatgcgacagaagatggtaatacgtgcttttcgccagtccggccgccctgagcaggtgccggagccgatgtcccagccccgccagcatggagacgatcaccgttctgtcccggttgccgatctccacgccagcagggcgtcgactttttccaggtacgcgaccctcgccttgaggtacgcgttctcctcctcaaggagctgttcccttgtgggagccggcctcggcttggatttcgcgcccctgggcctgcccttcggtttcggacgcagcgcgtccgggccgccggaccggtactcgcggcaccagcgctccaacggggcgggacccgcgatcctgtacttctccatgacttcggccttcgtcagcccatgctccacatggtcgcgcaccgccgcgagcttcgtctcgtagtcgtatctcctgttgccttcgcgttctcccatgagcgccgcctccccgccaaaccggtatgacaacacccattttcccgcggtactgacgggcacgccaagccggcgggcgagagaacgcctcccggccccgccccggatcaggtcggcgacgacccgcatgaaaccgtcatcgtaatgacgcctgcgatccctacacatgagaaaccgcacctccgatcatcgaatctgaattacttcagtccaacaatcggggtgcggttcaccaattctcactcggggctctctttattcgtgtttgcctgcaatcaccactcgatgccatactcggcatacatataaacatcgtattggtagtcgttgctgtagctcatatcgttgtgatgcgattcatgatggttgttgtcagactgcataatcgttccttttcctagcctcatcggtattacagtcagatataacgtcagcatgtaaccggggcatgctcacccaacgaaccgagggtgaattcatggcgaactgttgcgccctatgcttgcggccagtgaggctgaactgcagcgactcaagcgcgacgatccggaactcgtcagcgagtaccaatccaccaaaggattcactgcgaattacgaatcattcgatgaccgcacatatttgcgattcatcgcctagcagcgacatcgcgtgcgtattccgatgtctgccgggtgactggagaacactgatacatacgaaagcggccggcgctaggcattgctgcccggcgccggccgagaggataaggattattccttatttattactgcttaggctataacctcgctttcacagttgctcgcgattgcgacggtaggcgatggcggcgccagcacctgccagcagcagtccagccagagcgatcgtggcgacatcggagcccgtgttggaaacaacgttgccatcacccttggcagcggtacgcttcaccaagccggcaattgccttctcgagagcctcgcgagctgcgtcgacctgcttctgcgtggcgttgctgttgtcggagacctcacgggccttcttcagcgcggcgcgcagagcgttggcggagtcgtcggtgtagagacccaggttgatggcggcggccttgttgatggtcgcgttcagagcagccttgtccaccacgcccggttccggattcggcttcggctcggcggtagcttccagcttggagatggcgtcctgaagagcgctcagtgcggtatccacatcctgctgggtggcgttcttgttgtcgagcacctgctgtgcagccttcagtgcctcggcgaaagcttcccacgagttggtcgtgtaatcggccttctcgagcttgcttgccttgttcactgcagtctgcaggtcggtcttgttcacctcaaccgggcctgggccaggctcctcaccggtcttctcgagaccagcgatagcggattcgaggttcgtcagcgccagagccacatcgtaagcggtggccttatcgttatccgccacggcctgtgcagcttcgcgggccttgaccagagcagtccagctttcagccgtgtagtcggattccttaagaccgttagccttggcgatggtgtcgttgaggtcggtcttgtccggagcgacagtctcttcctcaacctcgcggtccgtggtcaaacgcagttcggcagcggatgcgaacttgttggcctgggagtcgctctggcctgcggaagacaggacggtcaagcgtacggcggtcacattctcgacggcgtcgaagctggccttctgccacatggtggtggtggagaactcagcatcggtgacgacatccttggtggtgccatccgccagagtgagcgtgatcttgtagcccttgatcttgccgttggcgttcatacctccggagcgcggcaggtagcgcaggccgttgatggtggtcggttcgttgaggttgaactgataccatgcggtgccgttgccgactgcgttctcgctccagctggtgtgccagtgggtgctgtcgttgccatcctgtgccagatcggccgggccttcgctcggcaggcctgcggtaggctcttcgctgcccgtggccacggtgtagccacccagctcatcggagccgtcagctgccacgtcgtacttgtcgctgctctcgttgccgggagcggtcttcatgtactcgtcgagggccacgagaatgtcgtatgccttggtgaagtcctcagcggttgcgccattcttgttgatgagcacgcgagccttgaccaaggtgtcctgatactgctgccatgcggcatcggagagctcagcacgcttggaatcgtacttgccgcggatttccttgaccttgtcctgcgcttcggccttggtgcgggtctgggactcgatgcgctcgatcttcaggttgtcgagcacgaagtccttgtatccgccgaagtcctgtgcattgccggtggaaccctgcagatcaggtgcggttgcggtcgagtaaataccgaaccaggaatcgccgttgacgccaccggtcagctcgaactcggccttgccggtctcacccagagccttcttcaggttggtcagcttcacgctgccggcagagtattcaccctggcccacagcgatggcgtagatgtcatcggaaccggactggtagtcgaagctcaccttgtacttggcacccgcctcgaacttcacgttctgcgggatcgtctggtagaccagcgtgcccttctgggtcaggccgttaaccttcacagaccaagtgccatcgagcacatcgtccatcttcttgacatcccaaccggcctgcgtgaacggagcatgcagctcggagaggtggatgcggttgtcctcaacgccttcggaaccggagaccacgaacggccagatgccctgggcgttgttttcgaatccgttggtgagggacttcagcgtgccgtccttctcataggtgatgccggagtactggttctccacgatgcgcacatcgtcgaagtaggtgtgtgctccgtcggtgctcttgtgagacagggttaccgtggcatcgccgttctcaggcgcggtgaagaacacgtacatgttctggaagtagctggagccattttccgtattgctgttcgtgttgtggccgtatgccttgatgtagttcttggcgatggacttgccggtggagttggcggccagcaccttgccgccgctggttacggtgacggatgcatcgccggtggagcggttgtcgacgccaacatacagcgcgtacttctggccagccttgagatcggtcagacgctgggagacatcgaccttgccggtcaggcgcagcatggcgttgttgtcgccttcaacttcggccttgccggttccggcgacggtccagttgtcggtgagggtgttggagccgccgttgaagccggcgtctaccacatgcatgccttcgctccagttgacctggatctgcttggcttcgcccttgtacaccacgtacggggtttcggcatcagcggtaagcgtcaccttgccgccggagacggcaacggtctgctcgttggtcttgccctgatcggtgagctggtacacctttacgctggagaggttcttccagctgtccggcagcgtccaggtggtggtgccgcccttggtgttccagtggtagagcttctgctcggaatccttgaccagcttgccggtgaaggaatcccacatccacggcagcaggtaggactcgtcgccagtggcgctgccatcgcctgcggagaccacaccggatgcgaccttcacgccgttgaaggtgatggtgcgctggcggtaggctgcgctagaggtgtcgttggaaccacgggagactactacaacgttgccgttggaatccttcagggtaatctgctcgttgccgttgttcgtgttcgggtcggacacggcagcggcattgccattgtcggcggtcagcagcgggttgttgacccagcgggtcaccttgaagtgctggatgaacttagtggacacatcatgggtgtacaggttcttgatgtaggcggcatagtcgttgcggccctgccagccttcgaagtccttcatgttgtagccgccgagcagcggggcgttggcagcgccgccgtattgcgggtagtcgccaacccagctgtccttctggtggttgcgcaggaagcgcatcacttcggagttctcgcccttggaggtgtagccgccgtaggtcagatcagctgcccagtgctggaaggtggagtcgtactcgttgccggaaccccattcggtggtcatacgccagccgttgtcgttgatcatcttgctcatcttgcgggtttcccaagaatcttccgaaccggaagaagtcaggttgccccacacatcgaggtagatgaagtccatgttgtcgccgacttccttgctgaggtcagcgaaacggcttacacgagaaccggatgccagatcgtagatgccgtcgatgccgacaccctgatcaagccagttccagccgtagctcaggccgcctgcagagttgcggcgcaccatgtcctcgctgaaggccttggcttccggatacatttcggaggcgttgacgtgcacaccgaagcgagcgccatacttggagccctcttccatcatggtgttcatgtcgtcggcgccgccgagacgctggccgatatcgccgtagtccgggtggccggagtcgtggccttcattgccgtagcccttgagcagcacggactggccgaggccgtcggtgttcaaggccaccttcttgacgttgtcaagcgtggtgaggaacgggttctgcgcctgggagccgaagttcatggcgatacgccatgccaccagttcgggaacttcctcggacttgtacgggttgttcatgatgtcgcggtaggcgattgcgccatcctgccagttgacggcaccgtcaccgttctcgtcgccggcgatggccacggccatctgcggcagagcggtttcggccacggtgtacttcttgcccttggaatcggtgaccgtgcggtggtagtaccacggagcgctggccaggcccagggaggtggcgtcaccagtctgctgggtggtggcgtagacacgcgtgttctggctgccgccgcgcacaggagccgccacataggtgccatcgtgctcggagttgctccacaggccggcactcaggccagcaccggagatgaagccgtaggtgtagtcgctatcggtgacgttagtatcttcggtcactgcgaagttggtatcgccaggcttctgcgtgttggaagacatacgagcaccagtgaattgggcattttcctggctggaacgcacggaaacgagactctggttcgggaaggacagcgtctggatggcgttctcctccacaccgttgccctcaggaatgccttcggacaggttgttcttgatcttggtgacgttgaggtgcagctggttggccttgaccgtgatctgaacggtgatcaccgcgtcaatcttcttggcctcatccttgaccttcagcgtgtaggtggcttcggtatcggaaaccttcttgaaggtcacgtcatcgtcggtcagttcgatgttggtgccgttgatctcaacggtgcgcacatccttggtttggccgtacatcaccttgccgtcggtcatcgtgtactgcagcacagaggggaagttcttcttaatctgaacttccatcttcttggtcttcagcgtttcggaggcgacctgaacggttttgttcagggtgatgggatcgatggcaaggtccgcgccggagaccgccacctgctgggagacgtcctcatagccttccttggcaatcgaaagcgtgtgttcgccttcttcaatgtcggcgaaggagaaggtgccatctgcaccggtcttcaccttggtcttatccaaacgcactgttgcgccttcaatggcagcgcctccagcgtccacaaccttgccggaaaccgcgtgcttggcggcttcgacaacctccgggaagtccttgatgtacacgtcggtgacctggttcagccccttccaggagccggccttgatggcaagcttgttggagaggttcgtcattgcggagtaatcgacatcgaatgccttctggccatccacggtcagtgtggcgaccttggcgtcggtccaggagacctgaatgtcgtgctcttcgttggcgctcggagcagcgatacgagcaccgctgtaccagctgccgctaccgccaccggtgtaggtctgccagaaccagccgtccgaatcgtagccgatgaacaggccgctgcccgggtcgttgtagcccaggtagaagccgaagcggttggcggagccttcctgcggggatttgatggtggcgtggaaggagccggccttggagaagtcgtaatctgtgccccatacggctactgccggccagttgttgctggagctggggttcgctgccgcattaccgttagaggcagtggacttgaggtgcagccaaccgtttgccatctccaggatttcgtcgccctgagcgatgttggaatcaatagtccagccttcaaccgcatcggcttgtgcggaaggagtctcggaagcagttgcagaatcagaagtatcgttgatttgctgaatctgacttgccaaagtctgcaagtcagcatcagacaggggcactgcgaacgcagtacctcccccgctgcccatgcaggttaaggctaacgctgttgccagcgcagccgatatagtcttcttctttttcattaactatattttccttaatctcttcttcgaggtgaagcagagataacgcccgattttttgcgcactttcggattccgggtctgacgtaagagggcatggcccgcgtcctgtgtacgattttcattcgccaaaacaaaaaaccgcgattggaagccaggagacggaaccatgcccgagaacatcatacagatcgaccagaacctgctcgagaccaggctcgaccgcttggtcgccgaaaaggtcgccgagctattgaacgcgatgctcgacgccgaggccgacgagatcgccaacgccgccaagtacgagcgcaccggggagcggaaggcgtacagggccggccactacgaccggagcctgaccgccaaggccggcaggctcgcgttgaaggtgcccaaactcaagggcgcggtcttcgagtccgcggtcatcgaacgataccggagacgcgaggagagtgtcgaggaggccctcatcgacatgtacctggccggcgtgagcacccggcaggtggacgacatcagccaattgctgtggggcgacaggatgccgtcccagaccctgagcgacaagctcaagaaggtgtacggggagatcgaggcgtggcgcacgaggccgttggaggacgagtacccgtacgtgttcatggacggcgtgtggcacaagcgttcatggggcgggcacgtggagaacgtcagcgtcctggtcgccatcggagtcaacgcggaggggcaccgcgaggtgatcggcgtggccgagggcatgaaggaggacagggacagctgggagcagttcgtccgctccatgatcgaacgcggcctgaagggcgtgcgcctggtggtcggcgaccggtgcgccggactcgtcgccacggtcggctcgatgctgcccaaggcgagataccagcggtgcatggtgcatttcatgcgcaacgtgctctcgaagacgccgccgacacaccgcgaatgggcgtccgccgccctcaaggccatattcgccatggaatcccgggaatccgccctggccaaggccgaacaggtcgccacggagatggaatccaggaggctcaaggccgccgcgaactgcctgcgcgagggcgtcggcgagacgacgacctacctgctggacgagttcccggacgggcaccgcaggaggatccgcacgaacaacatgatcgagcggctgaacagggagatccgccggcgcacgcgcgtggtgggcggcttccccgacgggaacagcgcgttgatgctcatatgcgcccgcatccgtcacgtcaccgcgaacgaatggtcgacccgccgctatctcgacatgtcccggctcggtgacaacctcgtggaagcgaactgactatcgcgccatggacggccacgatccaaagtgcgcaacttttcgggcactaccgaagcagatgccttcttcattgaagaatacgcattcgcaattacgataagacactttacaagaagctattcttaatagcaatctcagcaaatacggagaatcgccacatatttgacattgaattacaacgtgagtgaaatcacaaaacccaataaacgactacgttgttaaccttcacatctatattcgcatcatcgcgacacgcgcagggaaaaactgcgcaaaaaaagtaagacgaatttacctgcattcgacgcaatcaatgcagcagcattacagcagcaagccgattgagcaaaatagcaaaagccgccttgcgcaaccgcaagacggctttgacgacaatggtgaggctgtgctcgcttacttcttggaagcgttcacggcatccgcagccttctgcagcgattgagtataagccttgtaccaatcagcctgctcgttgagcttcgcagtagcggacttgaagccggcggtatcatcggccacgcagccttcgtagactggcagttccacgctcagctccttgttgagggcatccagggtggaggaatccttcacatctttctcggtaagggcggcggcatcagcggcatcgccattgaccaagccgttgtagtcgttggtggcgttgcgcacattttcggaagcggcggcgcaagcggcgactgcattgttgtactgagcatcggagtaggcgcggaagccgaacacaccggccacgacgataatggccacgaccaccacggcgataatggcgagggccgccttagacatgtgcttcttctgagcgccttcattgcttgcattgttggcgttgtttgccggcgcagtctgctgctcagcagacatacttcgatctccttcgttctcgtactttcatacacacgtatgcgctcttagcgctctcatgtgctctcatgtgcagggaagtcgcttttcaagcggctacttccctgaaaacaaaaaaccctcgcaaatccgcgagggttattggctggggtgcctggactcgaaccaagaatggctgaaccagaatcagctgtgttgccaattacaccacaccccaatttggcttggcgtagcaactccgaaaagttgttcgtcgtacccccaaccggatttgaaccggtgttggcgccgtgagagggcgtagtcctagaccgctagacgatgggggcatattcagtttttcaaccggctgcgaggcgaaccgcgcaacgagtgataaatatacgcaagtattcacccttgcgcaacttacggcgtgtcgcgcggaatttcaacgatttcacgccacagctctcgccagcacccgaatggcctatacccgaagacgtgctcgaccaagtcattacggaattctggaggcaaacccctccagtcgtacacaaggcgcctatctatttctcgatgaagtacaagaggcagaacattggcaaggattttgccaacgccttgccgagcacgaacgcgttaccttggttgtcactgtctcctcttccaaactttccagcgaacaggcattcctatgttacgaactcaacgaatacaccacttcattgaaacctgacaccactgccgtaccaaaaagtctatgcggaagatccgggactggtctacgccgttttacgtgccaatcaacaggatgcaggcaaacgattggaaaccgcagtctatctcgaattgcgtcgacgtcaatccggcaaacgcaccgattccattacctcgctgaccttgcccacctctaaaactgagtacaagaaaaggtgggcatctgcacatgcagacgcccaccttgagtgtccttacagctcagccgagcacggaaggaaccttagctcacaggtgctcgcgcaggcccttcaggcgagcgagggaaaccggcttgccgacgatctccatggactcgaacagcggcgggctcacgcgacgaccagacatggccacacgcaccggaccgaaagcgaggcgcggcttgtagccgccctcctcaaccagagccttgttcagggtctcatgcaggttgtcggtcttccagtcagcctcatccacagcctcgagtgcggcgatggccttgtccagcacctcgccggcagaatccttcagctgcttcttggcgtcgtcagccggctccaagtagccctcggtggagagcagggagccgaccatgccggcaacctcacccagcaggcgcacgcgcggctgaaccagcggagcggcggcggtcagcacctcacgctcacggtcggtcagggcatcccagttgtcggcggaaaccacaccgtcgcggtgcaggtacggcaccgagcggcgcaggaagtcctcgggctcaagcatacggatgtgctcggcgttgatggagatggccttgtcgatgtcgaagcgggccgggttggccttgacgtcgcgcacgtcgaacttctcggtcatctcgtccatggagaacacgtcgcggtccggtgcaatggaccagccgagcagggccaggtagttgagcaggccctcgcggatgaagccattgtcgcggtggttgaacaggttggactctgggtcgcgcttggagagcttcttgttgccctggcccatcacgtacggcatgtggccgaacagcggcatctccttggcgatgccgagttccataaggtaacggtaaagcacgatctggcgcggggtggagctcaggaggtcctcgccgcgcagcacgacgttgacttccatcatcgcgtcgtcgaccgggttggtcagcgtgtacagtgggtcgccgttcgggcgcacgatcacgtagtccggcacggagccggccttgaactcgatggtgccacgaatcagatcgtcaaaggcgatgtcttcatcaggcatcttgatacgtagcgcaggcttgcggccctcggcgcggaaggcggccttctgttcatcggtcaggttgcggtcgtagccatcgtagccgaactcggccggacggccggcggcaaggttgcgctccttgatttcctcaggagtggagaaggactcgtaggcgtagccggcttcgagcagcttggcggcaacatccttgtagatggcggtacgctcggactggcggtacgggccgtgagggccacccacatcgatgccctcgtcccagtcgatacccagccaacgcagggattcgaggatctggttgtagctttcttcggagtcgcgcacggcgtcggtgtcttcgatacggaagatcagcgtgccgccggtggcgcgagcttccgcccagttgaacagggcggtacgaatcatgccgacatgcggggttccggtcggcgacgggcagaagcgaacacgaacgttcttgggcagttcgggtttggtgttttcagcatcagtcataatcccctattgtgccgcgcgcgccggacgcggagagcagcgctcctcgctcttttgcttcgttattgacgtttcgggccaacaccatcccaaaacggccattttccaacgaaatctcttttgcctgccatttgcttttcttttaaaagcaaaatcaaaagaaaagaaaacagcaaacgagaatcagcaggccaggcccacgaacagcagatcccagtcttgagattcgtcttcatgcgattcgcgctgctcaacggcggcatccgtgtattcgtggttcatggcattccctacatctctgtatgttgctttatgcgtagcgccaaaagcttcgtctgctttccagttccacccccgcaactgtgcgcaatattcatgcaacaggttacacaaccgatcgataacgttcaccctcaactgatatcgatttgataaccatcgattctttccagtgcattcaccacaactttggacattatttggcgcaattgttgagttttccactcatgcaatggaagaatatgatgtgacacataggtcttatgaaaggggaatcaatgtctgatcccaacaatgtgcctttgcctcagcagcctgaggccaacggtacgcccacacctaatcccgtaccgcagtatggcgcaccggccccggcgcagccctcacagccggcgcagcccgcttacggacagccggcatacggtcagcctgctccgaccgcgaactcttatggccaggccgtaccaacctacggtcagcccgcgcccgacgccaacacctacggtcaatccgcaccggcgtacggcacaccggcccccgatggcaatccttacggcccggttccgccgtcttacggccaatacgccgcgcccactgccactgtgccgctggataagccttactacggatgctccttccaagaagccttcctgcgcttctggaagaagtacacggtgttcaagggccgcgcgtcccgcagtgaattctggtggtgggtgctggccgctttcggcatcaatatagtgctggacatcctcaacaccgccacagatgaaaagcttggcttcctcgccaccatttggggtctggtgaccctaatccccaccctggcactttccgtccgccgtctgcatgacacgaacaagcctggctggtgggttgccattttctatatcgcgatggttatcggccttatcatcatgattatcggcggtggtgcggcactgtacggcgggttcaggagccttggcagttatgactatggttatggcagcatggccgccggcggtcttggcgcggcggtcattggtgcgttgattacgctggccggctgcgttgtctatatcgtgttcatggctcttcccagcaagccggagggcgcacgttttgacgatggcgcggcggcaacccccatgcctcagggtgcttacggcgcaccatacagcacgcctgtacccccgaatttcgccgctccgaacgcgcccgcacccggcttcaaccagccggccccggcttacggccagccgcccatgccaacccccgaccatggccagccggctgcacccgcacctgattacggtcaggtgccggccccgcagtacggccaaccggaggccccggccccacagtacggccaggttccgccgatgcctcaaaacgccggcgacgaatccgcaacaccttctgagcacacggctcccgccggcgacaatgcccagaaaccccggcaaggccagtaaccgatatcggtgaacttccgttgaagaagttccccgcaaccaatgatgaagccctactcaacgcgagtagggcttcatcattctcggcactgtattatcggcactgtattcagccaactaccccaacggcatcacggcaatggactgcgaaagcatatacgattcacccggactaagggcaacgatacggtctcggcacgccgctgcctccacggccacaaagccacgccattcacccgtcttggcatgggcaatggcgttgccgccctgctctccgggattccacaccaccgtctgcggcgagccggtcttgccgatgcgaatcacacgacccagcacatggtcctgcaattccagtgcagcatcggaataatacacacggtccaccggctgatcgccgaacatcaccgatggctgttcttgtagttttggcgggaatccggcttccgtggcatccagatatgttgcaccccgcaaaccgaccagccgcgcgccgagcacatcgccgacatgcagatacgagtgcagcgccgcctcatacgacatcggctcacctcccgtgttggtaacggtcagcgtcatcgtcagcgtatcgctggcacacacctcgtatgcggcatggaaacgcacgttgggttcatcctcgatccatggcacttcgccagtcgtcagtcgttcggaatccagcacataccgcacacgggcactggtaaacgccccttcgtccagcgcccactggcgcaatcgtgcgaacccatgaatcggtcgcttcgcagtctgcccgccatgcacaaaccccggcccgaaccaggggaagcacaccggcactcccccgccaaccggctgaccagcttcgaaatgccatgtgcggggcgtccagattacatccggctgccccgccggggcccagcgcagcagatgcgccccgtaatcgctgattaccgcgctaccgccgtcattggtgagcgtgcgcagattgacgccattgcccataagtgtttcttcttccgttgcgtaagcgatgttcttcaccacatagacgatttccttggcacggaggaatcgcgagcaggggtaagagaaccgatcaggcgggctaagctgccttgattctcacaactccacggtttctttgccagggtcatctttaatgtgcgcaaacttggcggccaaggcctccttgttgcgcttttcgtcttcttccttggccttcttcttggcttcgtccgggttccagagcacatcgtcgcggtgcttggtccattcggcaccggccagcggggcaatgtattcggcggtggcggtcagcgtgtccgcgccagcggccttagcgcgcgtatcaatcagctcaagaatctgctgatcggtcaggcatatgcgcggaatcgagcactgctcgcgcagctcgttgacgtacagcagaatcggcaacgttacgatggcggtggcccgggcctcgtcagcaacatcagcggcatcagcaacagccggaccaaccaagccaaccgtctcggcatgcccgctcaccacgttcagcagcgcatcgcatacggcgagcgcggtggcgaaacggacggccacatcagccggctcgccggaagccgccaaacgtccgccagcctcggcatcggcctcaacctgagcctccacggagacaaccgtctcacggactgcggcctcgacatgcgaatcccagtcaacacctaaagcttcggcggcatcgaaaatcagctgcacatcgccggattccgagtaaccggccatcgtatcgtaggcgtcattggcagcaagcagcgtgtctacgatgctttgcggacggccaggaatctcatcggccccctcgtagacgaattcggcgtcaggcatcgtaacatcctgaccggtgagaatgcgtgcgaacgcgtgcgtgacacgcacctgcaggttctccgcatacttggcgtcattgtccatctgcatggcttcggtcagcggccacaggctaattagcgccgagccggcttcagcggcctcagctacccccggcaatgccgcgatccgtgcgattgcctcacgattgagttcaatggtcattcatgctcctctgcgttcaccacttgattgtagtgcgtcccattggctccctctgaggggagcccagattgtagctcagctattcaccagtgtgccgttacttgacgttggctgctgggtcgacatacgtgattgacatcacacggccggtttcgttgtcgtacgtcaccgaggtcacggaggcgagcgccgtgtgccgcaggaacatccagtgctcggggtggccggtctccagataatggcgataactgaaaatcggcgattcgtggctgaccaccacaatctgttcgccggggtgttgggcgaccttctcgcgtgcgaaatcatccatgcgctgcgcaatgtgctgataggattcgccccaactcggcttgtacaggttggtgaccagtttccaattgccgttcttccacagcgcgccttcgccatggccgatacgcttgccgcggaactcgttgccggcctcaatcactcgctcatcggcggtgagcatgagcggggcttcgcctcgggcctcgcgcacgggattcaacgcgtcaagaatcgcgtcggcggtctcgcgcgtgcggtccaggggagacgaatacaccgcggaaatcgtattggtctgagggctattggccagataggcggcggtggcctgtgccatacgccggccaagatcggagagatggaagtcgggcagccgctcatagagcagatggtcagggttgtagaccttgccgtggcgaacgaagtggatggtggttgcgctcatgagccgcctttctttttattcctacgggcatcttgcgatgttcgccgaagaacatgagaacgttgtcttaatatctccaatctaccgcgtgtcgcgccctaaccaacgattagagtatccgtgacgcaaatatgcgaatagggaaatccaacgcaaactttgcgcgaccatggacaacacatcattcgatgagggcttcgccggcaacgccacgtcagcggggaacatccaatcgggagcggaaaggagcgtagtgctgttatgtccaacaacctgtccaactcgaacaccattatggctggcatcaaggaagtgggtcacaaagtttttggtgggtatgcggagttgctgcgcatacctcataccgctcgttattccatcggttcggtgattgcctgcatgccgttcccgatggtgggcatgaccatcaccatttccgtgcagcattactacggcaactactcgctggcaggtatgctcaccgccattcaggcgattgcactggccgtggccacgccgctgctcggcaagctgaccgacaagttcggccagcggcaggtttcgattccaacgattctggtgtggattgtcgccgccgtcgcgctgaccacatccatcaccaatcgtgcgccggaatgggtgctgtactgtttgacgccgttcctggcagctattccgccgtggggcgcgatgagccgcgcgcgctggaccaaaatcctgaagggcgatcaggagcgtaccaaccgtgcgctctccctgtgcggcgtgctggacgaatgcatgtgggtaatcggcaatccactggcttccacactggccgtgatctccggtctgctggcattctcgttcaccggcatgtgcgtggtggtgggcgcgctgatgttcttgaccgagctgaccactgagccaccgtcacagactcagctggcccgcgctgagggcatttcccgcaaggaataccgtgagcgcgaggcggctcgagccgaagcgttgaaggtggagaccgcagccgaggagactcgccgccgtcttgagcgcgaaggcgtgaccgatgaggccacgattaacgccgccattgagcaggcggtcgccgatgcgcgttccggcaagaaggcgtccatctggggaccgggtctgattgcggtatgcgtcacctggttcggcttgggcgcgttccagtcggctacaggcatctcgatcatcgcattcgccaccgagtcgaatatgaagcagtacacgggctttgtattcgcctgcttctccatcagctcgttgatgggcgccttggtgtacggcgcgaagaactggtcgattgccctgtggaagcgcttctacttctgcctggccgtggtgaacatcggcatcagcacgttcctgttcgccaagcatctgtgggtgattatgatcatctacctgatcatcggcgtgtgccaggctccgacgtggattaacggcaaccagctcatgctgcacttggtgccgccttcccgcctgaccgaaggcatggcgtggatgggtgcgatgaattctatcggctcctccgccggttcggcgattgccggccagttcatcgaccgcatgggctcgcatggcggcttcatggtggtgaccactttggcactggtctcgctggtgattgcgctgattggcttcaagcagatcaagggctccaccgagcagccgaccttgactgaagtgagtgtgtgagacaaaagctaagccccctctgacgagggggcttatacgtcaaaacgctacttcggccagcctttgggcgtgtgttccagggaccagatgccgagcttgtgggagaagctgttctgccacttggcttcaagctcctcggcattcagtcgattttcagcggacttcagacggttcatcgcattggtgtgcgtatcgtcgagcagccacttgcgaatcaagaagttccagatcattaccacggcagtggccaccaacttgccgatattggtgcgcaacagatattcggcatgctgcgatacataggcatcatggttcatgccataagtggaaatccagataatcgcgtcattcatgaacagaccgactacagcgcccgccacgaagataagaatctccatccagcgcgccatgtcatcacgatgcttgaatacgaatttcatgctcgccagatagttgaaaatcagcgagatgatgaaagagacggtggcagccagcacgttgtgcatgtggaatatgccaaccaataggttgagaataccccagtcgataacaaaggcgatgacgcccacaatgccgaacttcatcagttgttcaatcagttttctcacaagggtattcaacactattgggctgactgcggaacatatattggctggaaaggccaataatctccccaaattggccttgccccggtccgttctgcaagcagcttcctacatccgcatgccatgttcaacagcaaccgctgaggctagactggaagcgaaccgaatcaaggaggaattatgcccgttattcacactcatgtgtccgtgcccaccacccctgagcagcgcgaggcgttgaaggctgcctatggcaaggcgattaccgccgtgccgggcaagtccgagggctggctaatgtgcccgttcgaggacaatatgccgatttacttcggtggtagcgatgaccagcccgccgcctatgtggaagtcaacgtgttcggccgctctgtgccgggctctgcttgggaaaagctgaccgagagcattatggccgcgctgaactccacgctcggcattcccgaggaccgcacctacatccgttacaccgccaccaccgactggggctggaatggtggcaacttctagttgccaccattcccctcgcagcatagctgctcgcatcgcctacggaaagcccggtgggctttccgtttaacggctcagggtagcaacttctagtttgcgtatgctggctcccctcagtcagcttcgctgacagctcccctcaaagagggaagctcagatgtagaaagcccgccggtggcgggctttctacgtttcaaggggctgatttccaacattcagaagctctactagcgtttcaaggggcttttaaaacaagaaaaccggagtataaacattgcaatttcaatggtcatactccggatttcgcaatcgaagagcccctcgaaacgcagatagacctccggaaaaccgaaaatccgcccctcaaaagcgagttacctcacctcatgcctgtcatcacacgatcttgggcatgggggtggtgaggctggtggtcaggttgacgtggaccagaccggcaccggcatgcacctcaaccttcttcagggccacggtgcgctcttcttcgggggcacggtcgttgtcggtcatggtcgccggggacttgaccgccacgaacgccagatcgtccagcgagatgcctgcgctctggcacagttccatggcctcggacacggactcggtgaagcccggcttgtaaatcacgcgctcggccggtacgccgtaggcgttctcggccacccacttggcgttctcggtcagggccatgcccttgtgcgagtgcggttcggccggcatggagccgttctgcaacgcgtcgacgaaaccgtcaagctgcggggccagcgcctcgccgccgtcgcggaacaggttgccgatgatcggcgtgcggaagcccagctcgtcggcggtggccttcagggacggaacctgatcgtcctcgccttcccacaggttgatgagcgggaaggtcggaatgtccaggttctccaggcgctgcacgtggaacgggtagcgccaggccagctcgggatcgtcgcgccaggtggaggcacgggtcaccacgatggcggcggacggccactgcgcgccgtattcgcggcaggcgatgtccagccacttctgggcgccggcgtcggtgccgtaaccggcctcgacgatgaccacgtcatgcagggcgcaggccatttccacggagaccagcgtcggaatgccgatggacacgttggcgaacgggccaccgtgcacgtagaccggggagccgtttacggtctcggtcttggccggcttgaccgcgtcggccagaatgccagtgatacgccacaggtccacgaattcgccgaaggtcacggccttgccgtccttggtgccggcgatcatcttggacacgcgctcggaaatctcgtccatcgagcgggagagcaccacaatctgcatgagctcgcaggtcggcgtgagcacgaccttctccggcacgttgcccttgccgtagtccacggcggtggagcgcagggagcggctcggcacctcggagacacgcggcacgagaatcgtgtcgagcttgccgtcatcgatggccttctcggcgaaggagacgagcaggttctgggccgcctcgatggcgcccatttcgccgcacagaccccagtcgatgagctcggggtgggtcagggaagccttgccgccgccggaggcaccgcccttggaaccggctgcggtgatgcccatgctcggctgacgcagcacggcggtcgcatcaatgccgcgtttgttcagggcgtcgatcagggcgatggtcgtggtggtcttgccttctccgcgcgatgccttgagcggcgtatcggcggtgacgagcaccaccttgccgtgcttgcgcggggcgtcagggttctcggccaggtacttcatgtagccgaatgcgtcgatcttctggaccagaccgtactggctggtgaagtcttcgatggtggtcatataaagcctttctgtgttgatgatggtggggcggggtggtggggcggctgccgccgcctcttcgcctaaaaacagcccactgggctgttttcttaacggcttagccccctcagtccgcttcgcggtcagctcccctcagggaggggagctcaatacggactaaaagtcggacatgtggaagccgttcttcatttccatgctgcgagtgtacagcacggagtcaagcagcttttcggtttcctccttgagctggtcggccatggtctggttggcggcggcgagaatctcgcgcacctcggggttacgcagcgcggcgatggtctcgtccggggtcatcggctgcacatcgccatccacgttgtcggcctcaaattcctcttcagcggcggactgcgcggcttcctcggcggccgtcaagcccagacgggcgatctgctcgtcggtggcggcgaccaagcggtggcccatcgcaccggtcttctcctggtagcgctcaacggcgttggacgtggagcggaaggcgccatcgcacagggcggcgatgatgcggttggcccagtagaagttctcggacgtcacgcgggtggtggtgtcctcaaggtaggcgggcgtggtgtccacgttcgggaagaacggtaccagcgtgttgaacgggttggagccgtatgccatccactggatggcgcgggaggcctgcgggcggtacgggcggatctgcatcaccgcgagctggctctggcggttgatgccgatcgtgcggtacatgtggcgggtgcgctcatcgcccagctggccgtacggatcgaacggggtgccctggtagtgggagctcagcacgtacttgatatcctcgatggtcaccttgcgctcaggctgacgggcccacgggatgtcgtcggaggtgggcttgtggtcggcgtccgggccgtcccacacctcgtcgtacgggttgaggaagcgctgcatgtaccaggcgcgcggggtgttgtacacgtggtcggagtcagagtgggagccgaaggcatcgcgcgggttgaacggggtagtgttctccaccgcgaggtccaaatggttggtttcgatgaattcggcaaggtcttcggaacacatgtgcgcttcctggtcacccagagcgtcctcaaggtcgaattcgtcgataccgagctggttcggcatggtcacgtaggcctcgtccggcacgcgcttggcaatccagtgatggccgcccacagtttccagccaccagatttcgttggagtcggagaaggcgacgccgttcatctcgtaggtgccgaattcctcaagcagcgcgccgaggcgctggacgccctcgcgtgcggtcttgacatacggcagcacgatggtcaggaagtcctcttcgccgatgccgccgggcacctcgggctcatcgcccttggccggcgtgtattccacgaacgggtcggcgccgagcacgcgctcgttggtggtcagggtttcggtggcgctcatcgccacgttcgcctcgttgacgccggcctcgccccaaataccttccttgaggtccgcgttcggcacggcggtgtactgcagcgggtcgtccggcagggtgatggttaggtgggagatcaccgacttgtattcgcgcggctgttcctccggcttcacgacgatgaagcgcttcgggttgaactcgccgttcgcggaatcctcgttgcgggcgatgatggtcgagccgtcatagctcgcgtctttgcctaccagaatcgtggtgcaggccatagtgtgatggtgtcctttctttgttgtagtcacgctcccactggcgggagctggacgacgaagtcggactgaaggtggttttgtactgacccacccccagtcagtgatgctgacagcccccgcctgcgggggctcatgtggctcacgccttgccggtcaggaagatgccgtcggtgtcgggcacttcaccgctgttgcgcagcgcgtgcaacagctcgttgagccagaagccctgattcaagccgggcaacggcttcttggtggcccacacctgcaggtagtactcatgatccttgtccggcggctgcggaccgttgtaccgcatgatcaccgccgggtcagtgctgcggcccaagaacttggaggccgaggagttgcgcccctgcacggtctcgggaatcatggccggcagctgacgggagaagtccggcgggatggccaacgcatgcgaatcattgaagtcgtacatcagcgcatcaatcggcagattggccacggaccagtgaatccactcgaagccgcagaccggaatcgaatccgggtccacgaactcccagtgcaggtagcgggcctcgggatccacatcatcgatgtagaacgggaaggagaccacaggcacgccaccattgaaatattcaggggccgcggccttggcgaaatcgtccgggatgacggtgaaatcggcggaaatcttcatacgtcccagtatcgctcatatgtgtgacgtactgggggctgtgcgttacggggtctctcccccagtctcgctacgctcgacagcccccactcatcagaggggggctagttgcgtcgggttatgagtgttttgcttcaatgtttgttcgacaggttcggcagtgtttttccgcagtgtgggctgatggttttccccggtgccgtcatcgtttcccggtgatgtgagaggcatcggtgccgccgcctgtatattcccgagttgccaatcggttttgattcggccggttgccgccggccggcgctcgggaaggaaaggaacatggcgataccgatgcccattgtgcaagatatcaggagactcgaccggcagggaatgtcgcgcgcgcagatagcgcgtcgtctgcatgtggatcgcgggacggtcgcgaagtacgcggatatggaggattgctcgcccaagccgaaggcggatcgcaggtacgggtcgaagatcgacccgtacgcgcatctggtggacgggtggctggaggccgatcgtctgctgcccaggaagcagcggcacacgatcaggcgcgtgcacgaccgtctgctggcggagacggactacgacggcgagtattcgaccacgatgcgttacgtgcaccggtggcgcgaggcgaaccgcggcgtgccggatcgcgaggggtacgtgcggctcgagtgggcggcgggcagcatgcaggtcgatttcggcgtggcccgggcccggatcgctggcgagatggcggacgtgcattgcctggtggtctcgttgccgtattcgaacatgcggttgtgcgtggcgttgccgggcgagaacgcggagtgtctgtgccatggcctgatgctcgtgttcgagcatatcgggggtgttcctcccgtgatcgtgatggacaacgcgaccggtgccggccggcgcaacgcgaagggcgaggtcacgttgaccggggtgttctccgcgttcgtggcgcattaccggctcgaggtccggttctgcaacccgtactcgggcaacgagaagggcagcgtggagaacgcggtcgggtttttgcggcgcaatctcatggtgccgcccatgcacgcggaatcctacgggcagctcagtcgtttcatgcttgaacggtgcgacgggctggcggcctcttcgtattgcccgaggttgccgggcgtgcccgtggccgaggtgttcgacgaggagagggccgcgttgatgccgttgccgtccacggcgttcgacccggttcgctgggaaagccggacggccgacaagtacgggctggtcgacatcgactcgaaccggtacctcgccggccccgattcggcgcgttccaaggtgctggccgcgatccggtgggacacggtcacgctcgcatcgcccgccaccggcgagctcctcgcggagtatcccagacagtacggacggtcgcgcaatgtggaggatcccgcgctcgtgcttccccggctcgcggtcaaaccccgcgcgtggcgggaaagctcgatccgcccggacgtgcccgacgatatacgcgcgtggcttgattccatggacgaaaagacgttgagggagagcctcaaagcgatcggggacgcgtgccgggcggccgggttcgatcccgcgatgcaggcgtgcggcgagatcctgcgctcgaacagggacatgggcctgcacgcggactcgctcacccctatcgcgttgcgcatgcgcgacggcgagtgggaataccccggcgggatcgaggagcccgacctgagcggctacgaccggttcatcaccggcacggacgacggaggggaagaacggtgagcgtcagacccgatccggtgatcccggagacccgacgcaggcgcgcgtccacgaccgagaagagcgagaggatcctgaagatgagccgcagcctgaccctgacacgcagcgtgctcgcgggcacgctcgccgaggccacgcccaaccagctcgacttcatcgaacgctggttcacggccgaactcgactcgcgcgagcgatccaaacgcctgcgcctgctcaaacaggccggcttccccgccgacaagaccctcgacggctatgactggaccaacctgaagatgcccgccgactgggggcgcgcgcagctcgagaacctcgacttcgtcgccggatgcgaggacctcgtgctctacgggcccgtcggcaccggcaagagccacctggccatcgcgatcggacggctcgcctgcgagcggggcgtcccggtgcgcttcttcaccgcgaccggactgctcatgcgtctgcgccgcgcccagcaggagaaccggctcgaccgggaactcgcgagcatcggcaaggcccgacttctcatcatcgacgagttcggctacctgcccatagacgaggagggcagcaggctcctcttccagatcatttccgattcctacgagacaaggagcatcatctacaccaccaacatcgaattcagcggatggggacgcgtgctcggcgacaagaacatggccgccgccctcatcgaccgcaccgtccaccacggacggctcatcagattcgagggccgctcctaccgaagcgaacacgccctcatgaccaaataaccaacacaacgcagacaggcagcggccgataccgcacaccctgcggaaaacccgctgcctacactgcggaaaaacaccgctcacaaagcggacgccaacttgctaaaacacatatgagatcagggcgcagaagagggactcgaataccagtagcgggttgccgttgccggctaggcgcttgcgggcgtgggccacttcgtccagacgggtcacggcaccggcccggttcaatcgcaccgacaattcggtgatcgacgagcggttctccaggttgatgaggcccaccgaatcctccgcattgttctgcagcaccgccacatctcggtagatggaagcgatggagttcagcgcacgatccaatacgtcgcgcgtacggcgggtgaccaaacgcttcacatcgtctttcttggcaatctggttgaatgcgccacgcagtttcggcgggatgcggtcgctcggtgccagtccgttgatgcggcggaattccgcttcctggccggcggtgatgcggttcgcgtccgcctcggcctgggccttggcattgtcgataagattgccggccaacaacactgcatccgaggcacgggccagattcagcacaccgaccacaagttcatcgcggtcggacataacccgttcgtcggtggcgtacaacttggcgatgccgatatggccttcggcgagtcgggccgcacgctgcgccacttttggctcgacattggtggtggaggtcaggaatccggccaccgcctgggtggagggcacggcgaggttcacgatgcgtgtgcgcgagcggatggtgggcagcacgtcctgggcgctgggcgcgcacagtagccagatgcaatgctcggccggctcctcaatctctttcaagagcacgttggtggtgcgctcaagcatgcgatccacgtcttcgatgatgatgatgcgccacggcgcggtggcgggcatctgctcggaggtagtgatgatctcacgcacctgatcgataccaatagtcaccttgttcgtggtcagcaccgtgacatccggatgcgtgccggcaagcacctgctgggtgacgcgcgtgggctcagcgctcatgccgtgatccgggctttccagcgccgccgcgaatgctcgggccatgttggaacggcccgatccgggaggtccacagatcagccacgactgggtgatctggctcgggtcgccctgcgcgatacgactgagcatgtcgattaccggcttttggccgactagtgaatcccatacgctcatgcgagctccttgatgtcggattcgatggcagcccataccgcttcaatgctctggctcgcatcgataacgcggaaacgattcggctcggcggcggccaagtccaagaaggcctggcgggtgcgggactggaagtcatcaccggccgattccatacggtcttccgcgtgttcgaggcgatggtgggacagggctgggtccatatccagcaaatacgtgcggtcgggcagcaggttgttggtggcccacatgcttaaggatcgaatctcttctggcgtgagttcgcggccaccggcctgataggccaaggaagagtctaaatagcggtcggtgatcaccacttcaccgcgctccaatgccgggcggatggtttcggcaacgtgctgggctcggtctgcagcgaatagcagcgcctcggcgcgcggtgcgatgtcgacggcgcccccatccacaccgtgcaacagcagttggcgaatggccttgcctaacgcagtgcctcccggctcacgggtaacgaccacggtacgcccctgagcctcaagatacgcacgcagccgctcgacttgcgtggtcttgcccacgccatcgacaccttcaaacgaaacaaacagaccgttcatgctattgaccttagcgttaggcgcagagttgcgcccaacaggcagttaaaccagctctacctccgtttcaaggggctgatttggtcttttctgaaggtctacttccgttttgaggggctgttgcccaagtagacaacgttccaaaacggcggaatgacgttggcgcggagccgttcatactcgtggttcagcagatgaccagccccttgaagcggaagtagatattctcaaaacgagaaatcagccccttgaaacgcaagtagagcaataattccgctcagccacgcttgggaattacggcggggcgctcgtagccctcgttggcggtcagccagtcgacgtcctttttcacagtggcgggggtggaaccgagtttttcggcgatgcgctggttggaccagcccttgttcgccaacttcttgacttcggcacggcgttcggcgcgcttggcctcctgcgccgaaaccgcagccgaggtaccgcccttcttgcccttgccggcaacggccttggcgccaccagcacgcccagcaccgcgacggccacgggtggagggaccagccgcacgcttttcggcgagcagtcggaaggcgtcatcaggggtgatggattcaggcgtgtactgacgcggcaccgtgcggttggtctcgccatcggtgatgtacgcgccgaaacggccgtccttgatggtcacgttcttgccggtgttcgggtccttgcccaaatcacgcagcggcggcttggcggcaccacggccacgcccgcggccgtacttgggctgcgagaacagttctttggccttgtcgatatcgaccgtgaagatctcgtcttccgaggccagcgagcgggtctccgacttgccgtcggcacccgtcttggtcaggtaggggccgtagcgaccgttgttggcggccaccgtgcattcggatacctcgccggtttcggcgttggtttcctcgtatgtgcccacttcgcgcggcaggctcagcagctttagcgcgtcttccagcgacagcgattcagggctcatcgtcttgaacaacgaggccatcttcgggcgcgacgcggcggcggccgcggccttcttcgaacccttcttggccgcagaagcaccagcagtatcgccagcagcgccagccgaagcctcagccggcggcaccaacgccacatacgggccgaaacgcccattgcgcacctcgacggtaccgccggataccggatcaacgcccagctcgcgcggtccaccggagtggttgtcgatcaaatcgcgggccacggccaccgtcagctcatccggcgcgatggtgtccggcagagacgcgcgcttcgggttgccttcggcgtccagatgctccatgtcttccagatacgggccgtaacggccgacgcgcacgtgcaggccgtcgccgatgtcgatggtgttgatggcgcgcgcgtcgatctcgccgagctgcgcgacctgctgttgcaggccttcgtgcgcctcgtcggcgttgcgggcggcgccctcgccggaaccgaagtagaagtgggtgagccagtcgcggccggattcctcgccgtgggcgatgcggtcaaggccgttttccatctcggcggtgaactggtagtcgaccagcttggggaagttcgtctcgagcaacttggtcacggagaaggcgagccagctggggatcagcgcacggccacgctcgtatacgtaaccgcgatccatgattgtggagataatgctcgcgtaagtggacgggcgaccgatctccttggcttccagcgtcttgaccagcgtggcctcggtgtagcgggccggcggctgggtttcatggccgtccggttcgatgtcgcttgcctcgacctgctggccgacgctcatcggcggcagggaggtgttggattcggaggcgtcacccctgacggccttggcgtccgtcttgccggcggcagcagcctggtccgagccagccccagcgccgggagcggcggccttgggcttgcgcccctcccccgtggccttcataaagccggggaattcgatgacggtgccggacgcctggaacacggcctcgccctcggtggggccggccggcgcagacaggcgcacggtggcggtggaaccggtggcgtcagccatctggcaggcaagcgtgcgctgccagatcagcgtgtataggcgcagctggtcgccgggaagtttggaagccagctcgtccgggtcgtggaagcgcgagcccgccgggcgaatacactcgtgggcttcctgcgcgccagcggttttggtggcgtactgcttgggctcggcggagaggaacttgtcgccgaaatggtaggagacggcgttgcgggcggcggtgatgccctcctgcgacagcgtcaccgaatcggttcgcatataggtgatgtagccgttctcgtacaggctttgggccgcgcgcatcacggcgcgagcacccatgccgaggcgattgccggcggtctgctgcagggtcgaggtggtgaacggcggctgcgggcggcggcggtacggcttggtttccatcgacatcacagtgaaatcggcggtcttcagcgccgaagccacggcggtggcaccagcctcatcaagctggcgaacgttcgccgcgaacccgtccggggtcagctggccgtcggcaccgaaatccttggagccggcgagtcgcttgccgccgagcgcgatcatgcgggcggagaattcggcacgctcccccagcgcgtcaggcgcggacagcgtggcgacgatatcccagtacggtgcgcgcttgaacgccatgcgttcgcgctcgcgttccacgatcaggcgggtggccacggactgcacgcggccggcggacaggcctgggcccaccttgcgccacagcaccggcgacagctcatagccgtacagacggtcgaggatgcggcgggtctcctgtgcgtcgaccatattgccatccacatcgcgcgtgttgttcagggaggcgttgatggcgttcttggtgatctcgtggaacaccatgcgcttgaccggcacctcgggtttcaaggtctgcaccaagtgccacgcgatggcctcgccctcgcgatcctcatcagtcgccagatagagttcatcggcgttcttcagggccgatttgagttcgctgaccgtacgcttcttgtcgccgtcgacaatgtaatacggcttgaacccgtcgttgacgtccacgccgaacttgccgaacttggccttgtctgccgcgggcacctggctgggctgcgcgaggtctcggatatggccgaccgacgccatgacggtgtaccccttgcccaggtagtcaccgatcttgtgggccttggtcggagactccacaatcaccagtttggtagccatacccactccttatgtattgcgcgaaacacacgacgtttctggcgtcataatactcatgaatcatgtccaactgccaaattccgccgttgtgccgggcaaattcggccgttcgcaccccatgttttaccgtttgggcggtgccggcggagcgccgatcagacccagccggcttaagggcgctgcagtgatctgacgcagggccagcaacagtccgaatgcgagcatggccacacccgcaatgcccacaacagcgctgacattcgccccctgaaccgcccagctggcgctgacattgagccccggcaccacctgccagatcacataaccgctgtaggcgagcaacagcaggcccccggtaatcagcacgctgccgacgatttgcacgctcactgaggagacgcggcgacccggctcgtccatgccggacttgcgcgtaactgccagagcgagcagggccaatcccgccaccagcaggatggacatcgccacatccgaagggcgatgccattgtccgtatatcacggagacaccgacggtcaccgcccaaaccacgccgatgacgcccgccaaagctcgaaccgcacgaggcacggtaagcagcagaatcaccgcacaggctgcggccagcatcgtgtgaccggaaggcgcggaattagcggcaggagattcagtgttgatgatgaacggacgcggcaacagacccttgatacgggtgacggccaagcagaccacggcgaacacggcgatttgcccggccaaccaccagcggcgtcgaatcagcgccgtaataatgccgattgcggcaattgtgcagctgacagcgataaccagccaggattgtgcgacggcgttcatcacgccggtggcccaggacggtacatcgttgtgcaggtttttccagaccagttcgtcgtacgattgtccgttttcggtaaacacgcacccccaccacacgccgaagccgatagcgatcaggagcagaccgaataccacgcacagtacgcggctggagattcgcgggcgcacggtaagcgggtcaagccgggccaagccacggtcgatatcagatgccccatccgcatcgtccatgtccagcggcctgaaatcccgtaaggagcctgatgtggatgccgatgcatctgaaccggagaccgggccgagcgcagccaatgggtcaacaacgttcgacgacgagtcaggctgcgctgcgcctgagccgaccagattgaccgccgcatgcgggtcgcgaattctaggggtctgtgcgtcattcatacgttcgactgtacggccgcgccccggacaggggaccacgctagtgccagctcacagccaaatccgcacataaagaaaacctccacacacccgtcagaggccacttacccttgctgcattcctgccctgggggagttgggtgacatagcgccgcgtggaggctggggataagtctatggagacgtatggaccagcgcagcgacacgaaacgtgcgcgccgggtcgcacggcagaccaaccagcgcattcaggcaatattcatgcaatatcaagaagcgtgcccaattgtaagaattccggaaaaaataccggcataaatgcgtgtggttacgctcacgtcaaacgattgttcaaggccaacagttacggtggacaccatggcttcttatactcgtcgtgcacattcgggaggcaatggccccgctctgaggcaaccgcgcaccgcgcaaagcagagccggccactccgcacaggagggcccctatacgccccaggagagccgttcccgccacgcaagccacaaggcttccaatagccatcgagccccgaacaggaagaaaaagaacacaggaaaaggcaagcaccgtgtactgaaatgggtgctgggcatcttcttctccctgattggactgggcttgctggccggtatcgcagtattcgcatacctgtacaccaccaccgaggtcccgcaacccgaaaagttcgcgttggccgagaaaaccaccgtgtattacgcggacggcaccaccgcgatcggctcctacgcggaacagaatcgtgaaatcatctcttgcgaggggctgccggactacatcggcaacgcgattgtggcgtccgaaaaccgtacgttctacacggataaaggccttgatctgaagggcatcgcccgcgcattcattaataatgtgaccaagggcacgcgccaaggtggttccaccatcacccagcagtatgccgagcggtattacatgggcgaaaccacatcctatgtgggcaaggcgcgcgaggccatcatggccatcaaaatcgcgcagaccgaatccaaggacgaggtgctgtgcaattacatgaacaccatctatctgggccgcaactcctacggtatccaggcagcggccaaggcatacttcaataaggacgccaaggatctgacgctgtctgaggcggcgatgatcgccggcattattccgtcaccgtccacgtgggatccggccgataacgccgatatggccaaatcgcgcttcaagcgtgtgctgaacatcatgcaggaggatggttacatcactgccaagcagcacactgatgccaagttcccgcagaccgccgcggtggcgcagcagaacgaatacgcggggccgaacggttatctgctggatatggtgcgccgcgagctggtgcagtccaaggcctttaccaaagaggatttggatactggcggatacaagatcatcaccaccatcgacaagagcaagcaggatcttatgcagtccatcggcgacacccgtctggacgacatgcctgaatccctgcaaatcggcggcatagcgctggacccgaagaccggtgaagtattgtccgtatacgccggttcagattatctgtccaagcagctcaacaatgccgatcaggccgtattcgaaccgggttcgactatgaagccgttcgctttgctgggggccgcgcaatccggcgtcagcttcgatacgttgttcaacggcaattcccaccagcacttcaccggcttggatcaagaggtgaacaacgctctggagaacaactggggcaacatcaatctgtatcaggccaccgccaactcggtgaacacggtgttcatgaacgtcaatgagcatctgacgccgaagcgcacggccgcaatcgcccatgaagcgggcattcagggcgatatcgatgaaaactccatgtacaacgtgctgggcatcaacgccctgaccgtgtgggatttggcgcaaggccattcgaccatcgccaacaatggcgtgaagaacaccttgcacatggtgtccaaagtgcttgattccaacaataaggacatgtacaacgcgcccagcaacggcaccaaggtgttcgatgccaacgactgcgctttggtacagaaggccatgcagggcaccaccacgtacggtacggcggccggcacatccagcatgttgggccggcccgtcgccggcaagtccggtaccgccaacgacgaaatggcttcgtcgttcgtgggatacacccccagcatgatgaatgtgtgggctatctggaatccggacgataagggcaatccgcaagtggtgccagccttctccggatacggcgtctcttccactggataccccgcccacctgttccaggagttcatggctcaggccttgcaaggcaccgaggcggagcagttcccgaccgctaaagacaacggcaagatcggcggctccgacggcacttggggcttgggcaagggacagagcagcggcctgtccaacaacaccaacaagcagtccaccgaagacgcgcagaagcaggctgagcaggacgcacagcagaaggcggccgaagaggaagccaagaagcaacagcaggctcaggagttcgcccagcagtgcctcgccaatccgagctattccaccgagtgcccgaattatcccggcaccactaccggcggagatggcaacgccggcaacaataccggcggtgacaacgggaacaataccggcaacgataatggtaattccggaggcaccggcgggaacaccggcaccaacggcgtcacccagtagtaagtaaaacacagacaacaaggctccctctgatgcaatcagagggagccttgtttttgctctgctagcgctcagcgcttgcgctggaaacggttgatggcggagataatcgacttcagggcgctagtggtaatcgacgaatcgatgccgacgccccacacgatctgcgcgtcatcggcctcgccgacctggcattccacgtacgaggcggccatggcgtcggtgccgacggacatggtgtgctccacgtaatccataatcgaggcgtcaacgccaaagttggaaatggcgttgaggaaagcggcgatcggaccgttgccgatgccggagacctcgcgctccacgggcgcatcgaccccgacgttcacgccgcggtcgagcagacgagccttgagcacggtgtcggagccatcctcaccggagctgacggccaccttgagcagcttcaagcggccccacggcacgagcgaggcgtcatgagtatcgcccacaaccacaccggcggcggtcatgccggactgttcgaccggcaggtactcgtccttgaacagacgccagatatcctcgtccttgacttccttcttggtcgtgtcagcgtagttctgcacgatcttgtcgaattcgatctgcagacgcttgggcaggtcaagattgtggttggtcttgagcaggtaggccatgccgcccttgccggactgcgagttgacgcgaatgatggcttcgtacgtacggccgatgtccttcgggtcgatcggcaggtacggcacaagccacacgaagctgtcgagatcggcgccagcacgctcggcggccacctgacgagcctcgagacccttcttgatggcgtcctgatgcgagccggagaacgcagtgaacacgaagttgccggcgtacgggtgacgctcggaaatcttgatctggttgcagtactcaaccgtcttgcgaatctcgggcacgttggacaggtcaagctgcgggtcgatgccttgggtgagccagttgaggcccagcgtgaccaagtcgacgttgccggtacgctcgccgttgcccagcaggcagccttccacgcggtcggcgccggccagcacggccagctcggtggcggccacgcccatgccttcgtcgttgtgcgggtggagggagagcaccacggagtcacggtcgtcgaggtgggtggagacgtactccacttcgtcggcgaacacgttcggcgtggtcatttccacggtggcgggcaggttgatgatcatcgggtgctcgggagtcggcttgataacaccgatcacggcgttgcacacctcgacggcgtactccggctcggtgccggtgaaggattccggcgagtactcgtagtacaggtcgatgcccttggcctcgttctcgaggtccttgcacagttcggcggcgtcggtggcgagcttcttgatctcctccttgttcttgcggaacacgacctcgcgctgcaacacagacacggagttgtagaagtgcacgatggcgcgcttggcacccttgagcgcctcgtaagtgcggcggatgaggtgctcgcggcactgggtgagtaccacgatggtcacgtcgtccggaatcagctcacgctcgatgagcatacggatgaagtcgaaatcggtctcggaagcggacgggaagcccacctcgatctccttgaatcccatggagacgagcaggttccagaaacgcagcttgcgctcggaatccatcgggttgacgagggcctgattgccgtcgcgaagatcgacggagcaccagcgcggcgcgcgctgcagtcgcttgcccggccacgtacgctccgggtaatcaaacgggatctgcttgtcgtaggcggcgtacttgttgtacggcatacgactcggcttctgcggatcgccgatgaatcgcgccggaggcagcagcgggtcgttgttccccccattggacgccgcagccactgccgcgagatcaaaaacggatgattgaccctgacccattgttcctcctttactggttattgcgcgggccctcttgcggacgcgactgcggcgttgtgccagggcggcgccgggccacgcggatttgtcaatacgcacgtaacatcctacaggccggttcgggcaaacccgcgggaaatgccgtatcgtggcatttgcttatgcacctggctgacatgagggcactcagcgtcggcgccgggccacgctttgactccggcacaacaccccgcctgcgataccccaccagatggccctccatacgtcggcggcgggccaaatattggtactgcaccgacagccaaacggctcagcgtcgtcagcggaccaacttatggcgaaataccgactctgggaaagcttatcgtcggcaaattgccaggctatggcacactaccgacgctacgaggcccacaaccatcggcaacgcgacaaatattggcccaccgccgacgctagcctctttgagcgtcggcgccgggccattctatgaatcagtaacgacgccaatggtctcagaacgtcagcatagggacgctgtctggatctccaccgacgctgcatgacaaaatcgcggcaccatcaagcaacaacacggctgcggcaccccgccctgccccgtcccttgctgtgccagtcctgtgaacgcgcgggcgatccgccgcccggcaacatagactgaagagctatgacgagcttgcgattccgcgaagacggcagcttccgcgtgctgcaaatggccgacgtacaggacggccccgatgtgttgcccgacaccatccgcctcatccgcgaggccatccgcgaagccgatccggatcttgtggtgttcaccggcgaccagatccgcggctatgatcccgcctacatcgacacgttcctgcgccgccgcggcgaagagccgggcgctcgcgtgcgcgcggtcaccgagatcgaggccaaaatccgcgggatcaagcgtcaccccgtaattcgcaaaacatccgatcgcgtggccgatcgtctcaccgaagccggcaagcctgtaccagccgcgctgcttgaccccgataccgtgacgaacgccgtcgccgctgccggcgccgattcgaccgacgtgatcacgacttccgaagtaggcgattccgttgagaccagccccacgcccgagacggtttccaccctcgtatattcaacgcaatccggcaaggccagccccgcacacgagacgccggcgaccctcgacgaactcatgattgagacccgcgaaaaggtccgccgcacgttctccggtttccttggtccggtcgtcgaggccggcgtgccctttgccgccacctacggcaaccacgacttccaatgcggcattctggccgacgaacaggatgacatctaccgcgaataccccggctgcctgaaccccgacgacagtctcgagcccggcacgttcgcgctgcccgtcgagtcctccgatggttccggccgcgtggccatgtccgttatgatggtcaattcaggcgattatgccggcaaacccgaagaaaacgacgcccaatacccggcgtatgtggtcaatccgcgaggactcgacctggccgacgccgacgggtacggcacccccacccccaaggccatcgaatggctggggtccgtccaaaccgagttgggcgagcgcaatggcgacggcaagcccgtgccggccatcgccttccagcacattccgccgcaggaattctacgattgtctgaaggaagtgcccgcatggacgccgaacgccgtggaaggcgcgcgcacgcacgccgggcgttgctatgtgctcaaccatgaggtctgccgccccggctcgcggctcggcgaggcgatcggctgcgcggacgagaatgtgggcgaggtggatgccttgcgcgaggctggcggctatttcgcgctgttctgcgggcatgaccataagaactctttcgttggtcatgtgcatgatatcgatctgggctatgcacccacgtgcgggttcgaatgctatggtcccaagtcgcggtaccgcggcattcgcctgtttgaattccatgagagcaatccggcgggctatgtgacccgcatgctcacatggggtaatctggtcggccgctactccagcaacgagctgcgcgtctggttcgaggatcattgcgttaccggagcggtcagcgcacgcaacgagctgcgccgcccgcaggtgttcgccgtggtggccggcgcgatgagccttggctttatagccatcatccgttcgctgatcaaggccgcgcgctaaacctacttaaacagactcaccccgcgacgggccgtgcaatacgcgttgcccagccaagtatggcgggaattgggccagacggctcccagtcgcggtgcgttctggctcatccagatgctcggcacgcgtccgtctgcggagcgtgagccgagcagattgaagccgttcttttccagcagccactccgggtgctgggtggcgatggccaagccttcctcgagggtgagcggcaggcgctcatcggagtcaataagtttgcgggccacatccggctcgcgattgacatagcacgtgccggtgtgcggattgacgaccagatagaacgggccttccggcggcatgaagccgtcttgaggcaggaagctggcgatgtcacgcggcggcatggtggtgaagcctgccatgcgattgatggaggttcgtgcaatcagcgactcaggcgaaaccagttcacgcgtgggcaccagcaggatgttcgatcccaaatcggaatgctcgagcgccccgatcagaggtcgggccagcgagcggaatgcggcggcggaaatatccgccacatccgggtagccgagagccacgatacggtcgagctgtttttgggcctctactgatgcgatagacatggctaccagtgtagaacatcgccttcgcttcattgggcagccaccatctgggaagaccactgccgttgttccgcgtgtttcgtacaattgcattgttttacggccacccgcatgacggccgtccgacgtaagtaatccatcgaaacccagaggtcatagaggtcatcatgtccgaaaaattgaaggtcggcatccttggtgccaccggtatggtcggtcagcgttttatcacgctgcttgagaatcacccgtggttcgaggtggtcacgcttgccgcttccgcgcacagcgccggcaagacgtatgccgaggctgtcggcgaccgttggaagatggaaaccccgatgcccgaatatgtcaagaacatggtggtcgtcgatggcgacgatgccgagtccgtggcctctggcgttgatttcatgttctctgcggtaaacatgccgaaggaccagattcgcgccattgaagagcgttatgccaagaccgagaccccggtggtctccaacaacagcgcccaccgctggaccccggacgtgccgatggtggtgccggagatcaacccggagcacttcgaggtgatcgagcaccagcgcaagcgcctgggcaccactcgtggttttatcgccgtcaagccgaactgctcgattcaggcctacacgccggcgctggccgcgtggaaggaattcgagccgcgcgaggtggttgtgagcacctaccaggcaatttccggcgcgggcaagaccttcaaggactggcccgagatggtgggcaacatcatcccgttcatctccggtgaggaagcaaagtctgagaaggaaccgctcaaggtgttcggccatgtggacgccgccaagggcgagatcgtgccgttcgacggcgacctcaagatcacttcccagtgcatccgcgtgcccgtgctcaacggccacaccgccaccgtgttcctgaacttcggcaagaaggccaccaaggaagagctcatcgaccgtctggtgaactacacgtccaaggcttccgagctggagctgccgcacgcaccgaagcacttcatccagtacctcaccgaggatgaccgcccgcaggtcaagctcgacgtggactacgagggtggcatgggcgtttccatcggccgtctgcgtgaggattccatcttcgattggaagttcgtgggtctggcccacaacaccctgcgtggtgcagccggcggtgcccttgaatgcgccgaaatgctcaaggctctcggctacatcaccaagaagtagttgaaactgagtccgaaactgagaaagccctccgcaaggagggctttcgtcgtatataccgcaaaaacgcggctcagtggctcagcggccagtaccgccgtacaccacggcttcgatttgatcggcatcgagaccgtatgcggtgtgcagcgccttgacggcgtcgttgagctgatcgagcggcacgagcgcggcgatacgaatctcggaggtagaaatcatcagcacgttgatgccctcatcgctcagggcctggaagaacttggcggccagaccggcatgggtcttcatgccaacgcccaccacggccaccttgcctacgttggtgtccacatcgaaggagtggtagcccagcacttcctgcttgtcgagcagtgtgttctgaacctgcttgacggccgattcgggcacggtgaaggagatgtccgcagtgccgacggatgcgccggcctgcacgatcatgtccacgttcacgccggcggtggccagctcggtgaacaccttggcggccatacccggctcgttcggcacgccacgcacggtggccagcgcctcggaacgatcgtgggcaatgccggaaatcaccggtgcctcggggcccaggtcagggaacaggtcgcccatggatttcgcttcttcttcagtcatgttttgccttgtcttgcttgaaattacttacgattatcgttcgctgtagccgcgctcagtcgaggttcggcagcgtacgcgggtcaatgccgtcgggcaccaccaatgtgccggggcgacgggagaacgaggaacgcacgtgcagcggcatgttgaaacgctgagcgtattccacacagcgcagtgccagcaccttggagccgcaggacgccatctccagaatggactcgtaatcgatggacggaatgcggcgggcggaaggcacgatacgcgggtcggcggtgaagatgccgtccacgtcagtgtagatctcgcagatatcggcaccgagcgccacggcaagcgccactgcggaggtatccgaaccaccgcggccgagcgtggtggcgtcacccttggcgttgatgccctggaagccggcaacgatggcgatgtctcccaatgagagcgcgttcttcacgcggtccggtctcacggccttgatgtgggccgcgccgtaacgggcgtcggtgaagaagccggcctgctgaccggtgaaggagtgggcacggctgccttcggcgtgaatggccatggccagcaggctcatggaaattcgctcgcctgcggtcatcagcatgtccatctcgcgctcgggcgggttggagtcgatgctcagcgcctgatcgataaggtcatcggtggtgtcgcccatggcggagaccaccacggccaccttgttgcccttcttttccgtctcaacaacgcgcttggccacacgtttgatcgattcggtatcggcgaccgacgaaccgccgtacttctgcacgatgagagccactgctgtcctttgttcttctcttagggggagtttgctcaatattctacgcaaacgcaacgattataaaggttgccgcgttcaccccgcgaccccgcgccgacatgtggacacgggcatggcctacgttgttcagcaaatattcaagttttcaccggtggttctttgaggcagccgcatccatcctttgagattcgagcggttaactatcaattaccggcaaacgaaagcaaaccggcgaggtttccgcagaccccataactgaataccttcttcttcctctctccttttcaaggcccggtcccgcagcccgggccttttccttttgtgttgggaacgatgggtcaaacgcacgatacgagctcacggagcaagcgtggccaacggcactaccaataccccatcatcccggcgataagcggcagccgtagcggtcagcaccatcaagaatgacggacggccttcgtgatcttgatcaattctgtcagccaactttttcaaatgggccgccgcaatatcaacctgcttttctccgagcttgacctcaatgagagcccatcgtccatcatgcaggccaatgaccgcatcagattccaatcccgtcttatcccgataatggaacacatctccgccaagcgcatcagcatacacacgcagatcgcgaatacacatggactcaaacagcaagccaaaggtctcgaaatcattaaggagtttctccggggtcgcgtgcagtaccgcacaagctatcgacgggtcgctgaagtgtctggttgggctcgttctcactgcagtcttagaacgtaaacgagggttccaagctggaagatcttcagttacgcaagctcgcgacaatgcatctaaataatcggagagtgtaccttccgaaggcggttcaccctgcatatccgccgcgatagtggattgcgacgcctgagaagaaatattgcgcgcatacgagcgcataatcagacgcatccaagttttattgcgctttataccatccatacgattgatgtcagaatcaagtagttcttcgacataatccgcggccatgcgcaaggcaacatttactcgagattcgactactgcttcaggccagccaccgcggcatagcgcaaacgcggtgttttcaatatcgaaatcggagaaacccgaaacatcatggttgccatcgaacaactctcccaacgaaacaacgcccgtcgattcctgcgattcaaataaggacatggtacgcatggttaatcgggcaattcttcccactccggaatgagctggttcctgttgaggagtcgccgatccagttaggatgaatcggccacgaccgcgccctcgatcgatggcgaaacgcaccgcgtcccacaattgcggggccatctgccattcatcaatgagtctcggctcctcacctcgcaggatgagagaaggctttgtatcagccaaggccaacagcgtagcactgcgatccgggtcctgcatgaagacctgactcgccgactgcctttctgccgttgcagtcttgccacaccattttggacctttaatctgaacggcaccagaagactgcaatgcctgagtcagcaacccatcagccactcgaggaaggtactcgccacgttgaatctccgagctctccactgccatatgtgccctcccgcaaaccgtcgaaacatcaacctataaatcactctattgcggaagttggaccattctaattgtggaagttggactattttcgttgtggaagttggaccattcctattagggaagttggacactagattacgaactagacttttccttttttgcagcaacagtgccaccaacacgatgggcgtcatcaccgcctatcgccagacccttttccttgacctaaaaagagagatgcccagacagtgccatcttttctctgatcacactagccaattcggaacgcagcggcgaatccgtgatccgcgcatcctctgcaaccgcgcctttgacgttcggcaatccggcgaatgagcttttgctcaggcgttcttcgtgattcatttctttggtcggaaaacagaatacgcgggaacgcccctcacgcctacgaaaccaacggctcgacgacgaaccgacatccacgaaaacagcaatagcgcctcttttatcgaggtaacatattccctctttatgcattcataccccccctatttgaaagctctgccaaatattgccgacgccgcgacttatcatgttgccatactttgcaatcctttgcatccccttgcatctcaacggcttgtccgaagtaagccgcatcactgacagccgtagcaacgttgttcgtatcgcattttcagacttcttatgccccctacattgcccctatatggccccgtcggcatgttgcatgaaaggcttggtgcggagtaacgtttcgcagtgtggcgcgtgcggtgttgccatttgcgacagcacctatgccatgcacgactaagacggacccggccgtcttgtataagcaaatcatgagcagatcaagcgaaggaacaggcgactatggcattgctgcatcgacgttcgacgagtaagcgtgcctcacagaaaatgtgggaaaacaacgcggccatgccggatgacgcatctgcaaatgacaacgtttcctcagcgcggcccgagcccgcagcattcgttccaacaccatttgacgaagtcatcgatatcagcgatctcgtggccgagcgccgacgcctgcaacgcaacctgtgggcgatgcgcatcatcaccattgtgctgctgatcgccgcaatcgccgtggcctgcttcccgctagcgttgcaattcgagtccgaccgcaacttggccgccaccacagccaccacggccaaagaagtagctggctggccttacccgcaggcggaagacaagctcacggcggcccgcgcatacaacaagaagctcgctgaatccggccagcctatcttgggtgaagccgtcgatccgttcgccgccgctcaaggaggatcccaagccagcggcgaggattccgcctcaaagaaagacaaggaataccagtcactgcttaataccggcaacggcgtgatgggcacaatcaaggtgcccaagcagtccatcaatctgccgttttatcacggcacttccgaggaagcactggcttctggtgccggccacttgtacggcacgtcgctgccggtgggaggtaaatccacccattcggtcattaccgggcaccgcgggttggttgaagcgctgatgttcacccgtttggacgaggtgaaagagggcgacttcttctacatcgaagtcatgggcgaaactttgggctacaaagtggaccgcatttcggtgattttgccggatgacacgtcgaagctcaagattgtgccgggtgaggaccgtgccaccttgatgacctgtacgccatacggcgtgaacacgcaccgactgcttatctccgggcaccgcgtggcgattccgatgccggctcccgagccgaatgacgtgcttgacgcgcgcaatatcgcccttggtgttggtctaggcatactggcggcaggactgttcattatctggttggcacgacgccacaaggccgcgcgcatcatccgccacggcgcattctggccgtggatgcgccgcaagggcgaaagcgccaatgatacgctggcttaggcctcgcgccgaccggccagtgccctgcccagcgtgatttcgtcggcatactccaagtcggagcccaccggcaggccgctggcaagtcgggtgaccttgacacctacgggtcgcaatagctgggtcaagtagctggtggtggcctcgccttcaatattcgggtcgagcgccataatcacttccttgacctcatcgccttctaagcgtttgagcagaccgggaatacgcaggtcggcagggccaacgttggccattgggttgattgcgccgccgagcacatggtataggccgtggtattcgcgcgtgcgctcgatgctcatcacatccttgggctcttcgaccacgcagatcaccgaacggtcgcgtctcgggtcggcgcataccgggcaggggctggattcgcacacgttgccgcaaatatcacagaagcggatcttggccttgacctcttcgatggcctcggccaaatcgcgcgcttcatcttcgggcgcggacagcatgtagaaggcgatacgctgcgcgcccttcggcccgatgccgggcagccgcccgaaagcgtcgatcagtcgttgtattgcgccgtcataagcaagtgccatgggtattcctcgctattcgtcctcattattcatccgagtgcttcttggcaggctggatgttcttggggttcttcggatcatctgccgcgaattgctcgacttttttgacctcgaatagctttttcagatcgtcgagattcatggccgtcgcctcgccgagcgactggtcgctcatcgagtattcgtcatcctcggccgcgacttgcggttgtggtttcggctggggctggggctggctattccacgggtcggcattcggggtcggctgtgcgggttgcggttgattccacgggtcaccgtgcggggtggcctgcggagccgattgtggaactgcctgcggttgattccacgggtcatcgccggcagccggctgcggaaccgattggggctggttccacgggtcatcgcccgacatattgcccgacactgtctgaggaaccgaagaagccggagtctgggactgaggctgattccacgggtcgtctcctggctgcggagccgcctgagcatggttcccctgcggttgattccacggatcatcgtgaggagactgctgatatggctggttccacgggtcggcttcggccggttgcgacgccggtgagaccgcggcctgagactgcgtctgattccatggatcgtcgctcgcgccggcaactgccgtaacggaagatgcggtggctggctgcccagtggactgtccagtgggtccagcggacgcaacggacgcagtgggtgcaacaggagcagccggagcggcccacggatcaacaccgtcactgatgtccggaaccgcaacatgcttcttgtgatgctcttcgggcgcaggcgtagcagcgggctcgttaggtgcgaacccgtctgcagattgcggcgaagcgttgcttacggccggcttggcccaagggtcatcgtcactccagttcttcgctgccgtggatgcactggattgtccggctcgatggctgtcgtctgcgtcctcggcttggcctgttgcagtcggcttcggagctttcgtctcgctccccatatgaatgcccaggctcgcgcccaaactcgacgcggccaatccagccttggccatggcaatctgctgcttgaccttggccaattgctccgggctcatacgtttgacggattcgactcgctcgccattcgccgcgaccgcagaaggcgcaataaccgcattggcgccgaactcgttgcgcacggcatccatcaccacggccgccgccttcttaccgctgttatccacggccaaggcgaaagcgtgctggctcagcgacttgtcgaacgtcatcgacaagcaaggcagacccttacggttggggccgaattttacggtcggcaccttgtctcgtgacacatattcacgaatggtttccggcaaagcggcgacggctgcatcccacttctcgtcgatggaccgattatccgatgccgcaggcgaggtcaccggttgagccgggacggccggcgacgcggcgggcgcgccccacccggcattggcggcaggagcggcaccggcagcagcagttgctacagcaggttgcacagacagagagcccgcgggtcggtcgctgaccgggccgttgacagggccgttgcctccaacagattcatgggaagcggtgctctgaggcgcggctgcttgctggttgcgtgcagcaccggagaatccgccatgtgaggctccggcaaacccgccccgcgatgcgccggcaaaaccactggcacccgtaccggaagcggctgacgtagtcgaagtcgaagaagcagccgcaggcggcataccagaagaagctggcgcgggagcggctgttgcaaagcctgattcactgccggccaacaatcgcgcggccagcagttccaagcgcatacgcggagaaatggctccggtcatggcacccaacgtagtgttgatgatgtctgccattgcggtcagtgcgcccagtcccagcgccttggcttggcggtgcagatcgtccatatcctcggcctcagccgtgtcggacagcacggattccgcacggtccccggccaacgtaagcaccagcagatcacgcacacgagccagtaggtcttcgacgaatcgtctcggatcgaatccgccgaccacgactttctggataacgccgtacagggcttcgccgttgtgatcgattaccgcatccacggcctcgccgatcagtgcctccggcgtgaagccgagcagggctacagcggcatcatgggtgataacgccttcgaccgaaccaaccatcagctggtcaagcacggacagggtatctcgcatggagccgccaccggcgcgcatcgccagtttcagcacaccgggctcgggcttgatgccttccttgtcgcagatcgtctccaggtagggacccatgacttcctgcggcaccagacggaacggatagtggtgggtgcgcgaacggatggtgccgatcaccttgtctggttcggtggtggcgaagatgaacatcacatgttcaggcggctcttcaacgattttaagcagcgcattgaagccctgctgcgtgaccatgtgggcctcatcgagaatgaaaatcttatagcggtcgcgcgcaggggcgaacccagcgcgttctcgcaattctcgagcatcatccacaccgttgtgcgaggccgcatcgatttcgaccacgtcgatggaacccggaccgccggtggccaggtccttgcagctttcgcattcgccgcaggggtgggaagtcggccctttggcacagttgacgcaacgggccaggatacgcgcggagctggttttgccgcagcctcgcggccctgagaacagataggcatgtgtgagcttgccctcgtccaaggcgcgcatcagcgggaccgtgacttggtcctggccgatgaccccttcgaaggtgtccggacgatagcgacgatacagtgcaagtgccatagctactaacctacctttgccctcagaattaaccgataaaaagtcaagataaaccgggctcatagttgccgaatcgggaaaactctttatattccaacgacattcacctgacaacggttaccgcatttttattgttattaaccgctttctttgtattaacatagtgtcaataacggttgtggtcaggaggcacccatgagcgataccctcgacgagaaacgccccacccgcggcgatgcccggcgcgacgccatcgtgcaagccgcgcgcaaggtgtgtctggaaaaaggcttctccaaaatcaccgtttccgacatcgcaagcgaagtcggtatgacgcgttcgctgttctaccactacttcgaagacaaggaagccgtagctgacgcagtactcgataacgtcatcgacgaaatcctcaccacgttgaagcagtggaaccaagcgcgcgaaacaggcaacgtgaacaaggcattagacgacatcgtgcatgtactccgctccctgatcgccgacgagagccccttctcaaaccgtatgatccaagacggcaacgccgaactgtatatcaagttcattgaccgcgcggcggaccgtattgccgactacattgcccagaccaccgtacgtgatttcgagcagatgcatggcctgccaatcaccaacgtccatgagacgttcttcacactgattgtggggcttatctcactgattcgctcgcatccgaacatcagcgaccgaaccatcaaagaggtcatggcgcagacgctgcatatcgaaagctatgtcgtctgaggtctgacgggcattggctctggtaccgctctcccgcactcccctcagtccgcttcgcggccagctcgtccgcaattgcggacagcctacggctgactttcttctggttcgactatcgtcgaaccctcgcctacaaacagcccactgggctgtttgctttacggctcagcctaatgaggggagccaatataatcgggtcacgcgaactggccggtcacgggatcgcgaccatctcgggcaatgacgtcgagcacttcctgtcgggaatccacctcacgggcggctacggccggcggcactagcacgcgcaacgcgcagtcctcggccactaccctaaatggcaaatgcccgatatattcgccgtccgccatcagcaccggtggctcgtcgccttccgctgcccgcgtgacttcgatttcacggatacgtttccagccgaacacctttgaagcaagtagcttgccgttataggcattcgaaatggccaccgcgcattcgccgaagttcggcacgtggtccatccacaccaggtccaacaatccatcggagaagcaggagtacggcgagacctcaatgccgccaccgatatgcctcgaattcgcaatcgtcagcaatggtgtgatgatgtctcgttcatccgtggtaccgtccgccaatgtggctttgatgtggtaaccataacgcttcatatgcgtcagctccaccagcaccgccgcaaagtagcgcatggtgccggtcggcagatgcgaatgattcgcacggtcgttgatgctcgcgtcaagaccacaggacagcatgcccgcatagtaccggtcaatcggatgctcggcggacttgctctcctggtactcgtactcctcgccagtggagggatccacggcatagccgccgtccaaagaggtcacgcgtcccatgtccacatcgatgtgtgatccgcgcacgatagcaccgacgataccttccactgcggtttcgatacggttgaccggcagcttcagtcctcgtgcgaaatcgttgcccgaccccgtggccacgatgcccaacggcttgccactgcagcccacggcgttcgctccaagtgcgatcatgccgtcgccaccgaccactacgagatagtcgtactcgtgcgcgcgttcacgcgcctggttcagggaatcgtcgaaactcgtgccggtgatgtcgatgacgtcgaagttatgggcacggccggcttcctccagcagacccaatacctgcgcgtccaccttagcgccacggcctttatcggaagtggggttgcccaccatggccaccacgcgacggcgctcgttgcgttcactctcgctcatgctctcaccttagccaaaggcccagaagcccgccagagtatcggtgctttacggtccattattgtgataattgtctccttccgtacaactcaccggtccggcccgagccatccgctccacggatgatgccaccaggaccatggtttccaccttgatggttaccaacacgtcttcatcccgcacggagcaggagcccaaaactacaccattcgcttcagccatgttggcggcgagcgcacatggatcaccgatatccgcatgccacagcgcatacgcggcgtcaaaggcgataaggtcggcgagggaacgcgctcggttctggcagatcatgaggttgcccacacttgccgccaccgcgagcgcaatgcccaccaccataaccagcatggctccggccatcgtgcccgatccctcctcataacgcattccctgcaccgcagttcctttctgttgcggccgcccagccagccgaccgttattggcttatcgccgtagcgttgccggtaacccgcgttggagttacatccagcggaccgggcaataccgaacattcgaccgtcacactcgtcgattggccgtcgtgggcaatgctgacgtggggctctcccccggcaacgtccgcagctatgctgcgcgcggatgattcgtcaccggtaaccacaaactcgcgtgcagccgctgccgcggcactttgacagtccatggaaacgatgaccacacgtcctattgccaatatcagcccggcgatggcgataatgctgggcaatacgatcgcgaattcggcggtggccgatcccgtgcataggtctggcggcagtctggcgagccgccaccggcatgtcatggtcttcatggctgtcacccgactttcagagcctgtttgatgatgttggtcagcaacgtcttgatggcatccgacttcaggatggcgaccagcaccgccgcaaagcctgtagccgcaacgagtacgactgcgtattccgcagtggccgcgccttcttcgggctcagccatgagggtgcggatgcgtgcgtccatgaggcatagccgttctttcgccttggcgttcagcgtggccacacgagccttgctgtgcgcaaagatgccggcctgcccgtcgacgatgacggggataggggtattcattggcgttcctttcggtaaggaggggaagctgcgcagtggcttcgcaccttccccatgcgtgtgtgagtggttggcccccgcgccgggttgacgcggggtgcataccactgtggactatcaacgcttcatgcaccagggaaaacggggtatgtggttctagcttgccgagttatccacaccccgacgtgtcgtccaccaccaatgtggataaccaaacgcagccaagtgcaataccgagcaatacaacaagattcaccctaagcgcactcagttcacgcctatattcacatcatgaaggacgcaatcgccggaatgactcctaccagcacgaatgccggcagaaaacatagccctgtaggcatcagtagctttaccgacagcttcgcggcattccgttcgatggcggcacgctcgtcacggtccagctgttcaatggcggattcgaggcgcacgccaggcatatcgccatgcgtccatgacgattccaaagccgattgcagcaggccaagatctcgttgcgttctgctggtacgttttccggatgaactatcagctggcgcaccctcatgctgaacagccatagcggcatgccacgcatcagcccagggaacccctctggccagggagctcccgacctcgctcatgcgagcgccgcagtcgccgccgacggctttgcccaccatgtcaagcgcccggggaatcgaggagccctgacgcaaggacacctgcaacatacgcaatatgagtatggtccatgacgacccgcaatcatgcgctacggccggttcctcgcccggcaagcggctgtcatgacgagacggagccttatacagccaactagcgatcgccgcacagcctgccgcggcgtgtacccacaccgtactcataatccgctgcctttcaacaatgcccgcatccatgccaagccggcagcataacaacatccccctaataccaagcagaccacaccgcgtggcgatccaagcaagaacgccaatggtctagctcccagaagctcgcccaatgccacagtgacggccggaagcgcgctcagcagccccacagtggctttaggaacggcacatgcttgcgatcgcaggttctgcatcagcctcatctgccggtaagcagtcaataccgcttccagacatggcactgcttggcaaccgagctcatcgctcaaaaccgctgcggcggtgaccccgcgtgcagcttcaagtacctgcgctggtgattcgtcgggcagacgccgctgttcgaacaccgttatgagccgttccacagtaatgcgctgagtggcgaagcgtctgctggattgttcctcgaatgcttcaaccaatgtgccgccacctcgcaatcgcgcgatggcggacgtaatcacctgcgcaacgcccacgcgaggtgagccggcatatcgaggttcgtttatggctgcggaatcgaccgcacgcccgcggtaagccagccgatacagcctcccggacttgttccccggccatatcagcacggcgagcgccaccagaacagcacaccgcatcatcacccaccaccactcggcccgggaacgatgccccatcgttcaatgaagtgcccccattcggcggcataccgaggaggatggcagccattccataccgccagcggtgttcctgccagttcaccatgtgctacacgcagttcgccgatctgcgtgatacgccgctgtccgttcactcgctccaaatgcaccaccgcgtcgaaagcgcctgccgccagcatggccaacgcctgtggactgactccggcgagtaatccaagcgaaatcagcctggacggtactcggttcacgccgtccgcatgcacagtggtcatgccaccgtgatgaccagaattgaacgcgcgcaataggtcgacgatttccgcgccacggcattcgcccagcaccacgcggtcggggcgcattcgcaacgtcgctttgaccaagtccgtcagacttatggctccgacgccctccacattcgcctcgcgcgttaccaacgacacatgatcgccacgccccagttctcccagttcacgaacttcctctacggtgacgatgcgctcgttcacatcgcattgcgccagcagcgccttgagcaaggtggtcttgcccacgcctgttccgccggtaatcagcactgtggcatgtctgcgcaccagtcccacgaacatcggcagccaagcagccgggaatacacctaattggctcagatgtcgcaacgatgccatggtcctgtcagggaaccgtatggagattgcggcaccttgtggcaccaatggggcaatcaccgcatgcacgcggatgccgtctggactggcggcgtccgctatcgggcaggcatcatccagtctgcgcccaagctgcgcgcacagttggacggcgtattctcgaactacttgcggcgagcgaaacggcacacgcaatactgtttctcgcatgccgttgccgcggtccgcccaaacgcggccatcacaggtcaccgccagatcggtaacctgcgggtcggatgccacatcattcaatagaccgaagaacacagttctgggcactgcgccgggctcatcagcccgagtgattacggcagccataccgcatcaccggtccttgcaagaagctcccgaaaccgggcgaatggcctgctcgacaagatcggcaagcaagctcacggctttgcggctgcctttggtcaccgatctgatgccgaggccttccagtacgtctccacacagattgacacttggtttgacaggccccaataccgtggcagtcaaatagtcctgcgcctcaccaatacccacgtggcctctcccacgtggagcgccacgtggttccacgccgacgatatgtggcgcttcacagccccatgaatccagtctggaccggtgcgacttggctctggccagccccatcaccgacaattccgcggcaatcacctgcatgccactgcgcagatcgggtacggtctcaatgagtccaccctgaccggcatctacgatgacaacgtcgttcgtttccgccaaggctcgaatggccgcttgaacttcccaccagtcaggctggcgcgcgctccaagggtcatagggaagtactcgcacaccctcccacatcatcagctcatggttcatcgcatcgccctcgatgcggccgaggggtgcgtcgacttggctgaatcgtaaacccggctctcgttctacacccagcagcaggtcaaggcatccggccacgaaatcagcgtctatgagagcgcagctgtgttcacgtctcgccaatgtccatgcaagcatggaagccatgacactcaaccccacgcctccatgacctgacgtcatcgtcacaatgttatggaagctggtgtctgtagttagggcgagtgccggagcctcgcccgatctctgccgttcgcatgaggccaacggcctgggcggcggagtgtagtagcgatgcgctggaatcggcgcatcgtccgtgggcagcggaatgcccggaggtgctaccgctggcgaggtgatcctacgcgccacgcggtgtgtggtgttgctattcataagccgattgaaacgtgtccgagttcaatgctcaacacgaatcgaccattgtggttctagcttgctgagttatccacaccccggcatgtcgtccacgacaaatgtggataaccacgctgttgtttcacgcccatctcatgcagaaaaggccctgacctcatatgcacagtcagggccttcattttcacgacgattccttatgcggtaatctacattccttgcttacttatcgaggttcttgatgccgtcttccatgacgtccaactgagcatcggtcaccttggccggcttcttcttgccgaacttggccttgagcagaccgatgatggtcggggcgagcgaaaccagcagaatcagcacgatcaccagttcgaagtgatcctgcacggccggaatgttgccgaagaagtagcccagcagcgtgaacaacgtggaccagcacaggccgccgagcactgagaacggcgtgaaacggctccaacgcataccggaaataccggaaatgaacggcatgaacgtacgaatgaacgggaagaagcggcccaggaacacagccagcgggccccacttttcaatcatgccctcggttttggccagtcgctcaggagtcagcgccttcaccttgccggattggataatacggcggccaaagaaatgaccgatgaagtagttgcactggtcgccgataatcggcgcgcaccaaaccaccggcagcaaccagaacagcggcagcgcggccttgccggtcgcagcatccggggctgcgaacacgccggccgcgaacaacagcgaatcaccgggcaggaacgggaagaacaccacgcccgtttcgatgaatacgatgaggaagatgaatccgagggtcggcgccacgcccatggcaatccaaccggcaatcgcggcacgcggatccttcagcagttcgatgatgaaattaacgaagcccatgtgtttcctatgagtcctaaatcttgtattgagctgccagcccaatgaaccagacagttatatgcaaaccgtcaaataccctaccagccggcctataacatcaggtcgactggggtttcccacacaaactccgcaatacaaacgaaatttctactcccccaaacgctgccgcacaaaggcgtccagcgcggccgcatcgatgccctcatacgagtcgatggaggcaaactggccaaggccggaagtgtcggtgcgaatccagccagtctgcgcaatcagtgtggcccccgaggcggcgccggagcgcagaccggatgaggaatcttccattaccacgcacttgaccatgtcttcaggcgcgatgccgagtctctcagccgcggccagatatggggcagggctcggcttgtgctcgtacggatcatcgccgcagacgtagccggcaagcaatccatcagcctgcttcatgatgttctcggccatgcggcgaggcgaagtagtgaccagcatggatgggatgtcggcttccttgagcgaatgcagcacgtcttgcacaccaggaatccacggcagacgttcgacctccgccttgaacacataatccttgagctgcttgtcgatttcgggaacgctcaatgtgcagccatgcgcaatcatgacctctgccacgtgtggtaccggagtgccggagcactcccaaccgaggtcctcgttccactcgccgccattgttgtgcgcgatctcaatctcaccgtcatgccagagcggctcagaatcgatgagagtaccgtccaaatcccagaacacggctttgagcagcatagttacctccgtccacatgcccgcacgccaattggcgcctttactcttgctgcattccattgcaccaatcggatgcgacaaccatagcgcgtcagcacaccgcccctgcgcctcagcgcatggtcagcccaccatcgacgtgcagacattgtccggtaatgaagccggccatgtcggacgccaacaacgcgacccctccggcgatgtcatcgggacgggcaaggcggccaagaggcgtcatggcaatgattcgttcacgaacatcctcggtggtggctgcgctggatgcggttccggccgtcaaacctgcggcaatggcattaacggtaatgccgaagccgcccagctcctgggccagagagcgggtcatgccgaccaagccgcctttggcagtgatatacgaatggtagggcacgatgggcgaatcgaccagattgctggagatgttgatgatacgcccggaggtctgggctcgcatcagcggcaccacatgtgagcacatcagatatgcaccatgcaggcatccctcgatctgtgcgctaaactcatcccaatcgcctccagcaaaagtggaacggcgacgcgggtcaaaggagaagcgtccgaaagcattattcactaagatgtccacgccgccgaatgagtcgacagcggtacccactagcttggaagattgcgattcatcgcaaacatccgcctgtacagctatagccgagcctcccagcgagtggatgtcttcaacggtgcgctgcgcgctggcggcgtcatgtacgtaattgatgacgacagcggctccgtgcgatgccaggcatttcgccacagccgctcctatgcccttgccagaaccggtgatgatcgctgttctgccatccagattcaccattggacgccgtgccatatcgctttgctctgtcattacccttgcctttcgccctgctaccagcctctgctgcccgcaacagcacaggcctattccatatccatatcgaacgaatcgctgtacgcgtcgctgccgcgttcgacatccaccgcgcgcaacagatcgatgaggttgaagcccccatcatgatgccagccggatttcgcccgatccatctcaccgagcggacagatgcgattcacaccgacctcggccaatgtatctgcaagaccaaacagtctggttgaatccacagcgacaccgcagctctgcagccagccacggcaggaagtcagtcttctggcagcgtccaacaaatctggcaccgccaccacgttgacggtgcggttcaacggcgacatcagcgaagcaacatcctcgtcggcaccgctaccgtcaagttctcgatacagcaccgaccatgccgtgctatggccactggcgaacaccgcggccttcccgcccatcaaggctctcatctcagcgtcggtgcgcgcccgctgaatggccacgttctcggcgtcactcaatacggagcgcggatatttgcgctgctgattctcaagctcgccaccgagcagctgagccacttcacgaggggtgagggctccatcagtctccacgaacacggtctgcggagccaggcagctttgctggtcatatgtggcgatgtcaacagccacacgatgcacggtatcggcataggtatcaggacgcaaagcctctcggccaatgaacgccaacccgacttttgctccgtaacctagacagggcttggacccggcgactttgcccgcaatcaatttggtagtctgcgaagaaccgtaaacaatcacggcatcggccgcatcgatggctgaatcctcgagctgctgcgagccgcccttccatggaaccaccgcaatggcatcagcgaggtcggaattgaccatcgcaatgctgcgagcaaagaacgcaggcatcaccggctcggaaaatgaagatttgccaagaatcgcgcctttgaccagcagggtcatcgccatgctccacacgggaatccccggcacattgctggagaacacctgataggtgagcgctgggcccacatatttagagtatccccccgccttgttcggccggaattcgtcgagcatagacggctgaccgatttcggagtcaaggaaccggagcagttcacgacgcctgaactggcgcatataccgtttgagctcaatccgcaccatgtcaggctcatatccggtgattgcgggaatcagcagttcagcctgacgccgcagctcaaaatccggatcggcccatagttgggccgcgtcggccacgatgtcgagaatatcgttgacactcatcgcggcaagcgtgcggttgcgaacatcgacaagctgcttggcaagggaagtcacctttgagccatccagtcgcggatagcgcaaacgcttcaccccatccgatgtggcgacctcatagatttcgtaatccgaaacatccactcccgagggcaggtggaagacatcaatggcctgactcacggattcatcaacggttggcactgatgacctcgtctaccgcgattgagcacccacgagcctcggctcccttcgccctgccctgcagcaggaatccgtccggggtccgatggccgaggtcctcggtcagaataccgatgcatgaattccaattggcaaggtcgtaatgggctatcacaccggtctcaccatccttgacgggagtcagcgtttccggatcgaggaagaccgtgcgcacccaggcggggttcgccttgagatagttgctggtgccatccgtataccacgacagaatattttggtcatagatctgcgagctcaactcggtcatgccatacatgttgacacagtggtggcgcggcacccccagtgtctgttccagctcatcaagcatctggtcttcggtgatgtcgcgcttagtgctcttgaagccgccagtgtcgaacaaccggctatcgggggccagcgcgaacgtcagatcatgctcatgcaggtaatcgagcagatacagataggacgacgagacacccatcagcatcaccggttcaccgtcagacaccgcacggttaaggaaggcgatgatttcatcgaacttgagtccatgctcgtcgaagaacacaccgctgccttcgctgccgcagcactccacggccttggtaaggtagcgcgacagggaggagttctggttcatgtcccatgccggcgaaatcacggcgatgcggatacgctctcgatccggcatgatgaaatgacggaacggcacaatcattgattcatcccacacctcaagatcggggtggaagttgcgcccacgcatcttgccgccatgcgtggttccgctcgtcatgaatacggctctgcactgctcggtcggtatggtcgaaaggtcaaggtgcttgaacccgtccaccggcatcggcggaatctcccgccaatccttgagcgttgcgggggtgacgcgtttagccgcgcagtaacgacggtacggcagatcatacgtgtactgatagatgaacacgtcgcgcgccaacgcaccaaacgcctcttccggggcctgctcacagccataggtatggataaaatccagaatcccgcgcttgatacgacgcgcgtcatccatcacatcagtcattgcatcgctcctgtcaatatccaatatcaaccagcattatcgttcatcgtacgccgcagcgccagtcccatccgccggatcggctgctggaacatccacggacgccggcgcacgatgcttcgccaccaaatccggaagagcgacgaaaagcgcattgagaatgatggcgctgaatacaccgaccatgatgttgttgccaaagaacacgcttgcgccgccggtcaggccggagagcgccttgggcagggcgatgccgagcaacagagacatgccgatgaccgtttgacggcgctcgtcatcagcgaccttgcgcagggcgcgcaggccggtcacgattaggctggccgcagccggcaggaaaatgcctccgacgactgccgagggaatgacggacagcaacgcgcccgcctttggcacgaagcccagaatcagcaacagcacagcggcgatgatcacaggcgtgcgcgtgcgcaacttgccttcgccggtcaggttgagcaggccgacattttgcgggtaggcggtggtggtgaatccaccaatcagcgaggaaatggctgaaccggccgcctcgccggcaagaccgtagcgcacctgcttgcgttcgagggacgtgccctgaatctcagaagccgcctgatagacgccgagagcttccatgacggcaaccatgtaggcaatgaagaacgggatgaagatcttccagtcaaatgtgaacggaccgtagggcaggaaggtcggcaggcccaaccatcccttggatgccacaggagagaagtccaccatgccaaacgctgcggcgaccacggtgccgacgacgagcgcgatgaggaatgagaacgacttgagcaggcccttgccgagcaacgacaggacaagcacaatcgccgtggtcagaatcgacacggtcaggatgtgcggatcggcgaacgtcttgtcgccgggagccccgcctagaaactcgctcagcgtgaatccagacagcgagacaccgaccataaagatgaccacgcccgaaatcatcggagagaacaggaaccgcatccgctctatcacaccggtcaggcacagcaacaggaacacaagcgaagcgatgagaatggacgaactcgccgcccccagcatgccggccgtacctgccgcgatcatcaacgcgtcaaacgcggctgacggcccctgcaccaccggcaggcgaaccagccgagtggcctgaaccaaagtaaccagaccagagacgatgaagatggcgttaatcatgttcgacgacagggcaataggtaagccgattgctccggccacaaacaccggatcaagccagacgttggaaacaagcacatgctggaaacccagcagtacgttctgggcggtcagctccttgcgtattgacatacgcttcctctctctcaacgcgcatatgggatgccgagccgaacagaggagttcaaccgtcgcattccctacgcgagtgttagctcacaggttcgaagggttcggcacataccgtctcagcctaaagcaccccttacgaatcggttttcgcacgtcaccgtaacaaaccttgacatctccgtcaagaagattcgtgcttttcggcagctgcccgatgtgagataacaaacagttttacgaatggagaaggaatcgaagcaatgcggccagactcaccaaccccacaggaccatggacttggagtcggcgggagtgtagttggagtcgccggtggcgccggcagcgatatcggcggcagtatcgcggccgggcagttcgcgggtttcgcggcggatggcgttgcgccagaggcgggcgcggttggagcgttgtatctccacgatattgccgtcacggcctgcggcgaaaacgctctcctggtcgccggtttgcatgcgtttgacttcgcggcgcagttggcgattctcttcttcgaggaccaaaatgcgcgcgataccggaaaggttgatgccctcatcctggctcaggcgctgagctcgggtcaggcgggcaatgtcgcgcaggcagtagcggcgtgcgccgccatcggtgcgctgcggacgaaccaaaccgaggcggtcgtactgacggagagtctgggggtgaatgttggccaactcggcggtctggccgacggtgaagatgggcagttcgatgtcgaagccgacgtcatcggctccgtcgagatcggccctgcccatcacgagcgcggttgcgcacatcgcgtataactgcttcatctggttggctaaccgcgccattgttcacctcctgattacaggctgagatagtcgccggctttttcgtcgaattctttggcggcgtgcttgacggccagacccggcttggcggggaccatgatctgcacacggccgatcagatcgcccggctggttgctgcgctggacgccaagtcccgtgagcttgacttccgcgccggagctggagcctgccggcaccttgaaggtaacgggattgccgtcgatatccttggcctcgaccttgccaccggccacggcctggcccacggtgacgggcaggtccatgacgatatcatggccgcgcatcgagaatgtggcatcgggcttgacggtgacgtgcaggtacaggtcaccggccttgccgccgttgatgcctagcttgcccttgccggccagcttgattttctgtccgtccttgacgcccgcaggcacgtgggccttgaacttcttgccgtccacggacagggacacggtagcgcccttgaccgcctgacgcagggtcaggctgatcttggagttgcggtcctcgccgttttcggggcgcggggcctcctcatagccatagccgccggcattgccgtacggcgattggccgtagccgccatacggctggccgccctgacctgcagcaccgccgaacatcgagaagatgtcgttgatgttgttggggccgccgcccgaagtggagaagcggatgcgcgagccattgccgccggcaccctggccgaacatggaaccaaagatgtcggagaaaccggaagcatcgaagccgccggaaccgccggcgaagcgggcaccgcccatgccgaactgacgaatcgcgtcgtacttctggcgatcttccttcttgctcagcacgtcataggcttcggagatgtccttgaacttctcctcggcttccttggtcttgttgacgtcaggatggtatttgcgggcgagcttgcggtacgccttcttgatgtcatcgtccgaagcgtccttggagacaccaaggactttgtagaagtctttgctgagccattcgttttcagccattcatgtctcctttctagaaaagtctttatgtaattgcacctccctctgatgagggaggtggcatcgcgcagcgatgacggagggaaagatagcggggactatgggcatcaagaatgtggccctctgtcttccgcggcctgcggccggcttctctccctcagtcagcttcgctgacagctccctcatcagagggagctaaggcactgtcaactcattgcagcgagctggatgtcagttttgcggggaggctactactactcgggcggcgcggattacgcgatcgccgatgcggtagccggcctcgaccacggtgtcaaccgtttccttttcggcatccgcgtccggcttgtgcaggatcgcgtcatgcttggtggggtcgaagtcctcgcccttttcgccgaacttctcgacaccgaacttctcgaaggccttgtcaatcttggtggcgacggccttgaacgagtcgtccatctcgctgtgttcgcgaatgcggtcgatatcgtcgagggcgggcagcagcgcggtcagcacgtcgatgatgccgtgctggcggaagcgctcctgctccttctgcgtgcgattgcggtagttgatgaactccgcacgttcgcgttgcagggcttcgaggtagtctgcggcttccttcttggccttgccgagcggggtgagggtgtctgcggaatcggactggccttcgccagtcttctctccctcagctgcggcaggagccgcgtcggctccttcattggaaggagcctgggcagccgaatcctgcgcagagccggactcggcggaggcgtcagcccctgaagaggcctgagcggcagcctcagcatctgagggatccggcaggtcgttcaggtagtcgtccttgttgaactcggacatcacttgttgtccttgtcgtcatcgtcgtccacgacctcggcctcgacggtgtcgtcgtcggaaccggaggcggagccagcggaagcgccggcaccgtcagcaccagcggcagcaccctcggcaccctgctgggcgtagaggacctggccgatcttctgggcggcggtcatcagctcggtctgagcggtcttgaccttctcggtgtcgtcacccttcagggcttccttcagagcgttgaccttgtcggtgacttccttgacgatgtcgtcggagagcttgtccttgttgtcgttgacgagcttctcggtggagtaggcgaaggcctcggcctggttgcgggtctcggcgtcttccttgcgcttcttgtcctcagcctcatgagcttcggcttccttgaccatgcggtcgatctcgtccttcggcaggccggaaccaccggtgatggtcatggactgctccttgccggtgcccttgtccttagcggacacgtgcacgatgccgttggcgtcgatgtcgaaggtgacctcgatctgcgggacgccacgcggagccggagcgatgccggtcagctcgaaggtgcccagcggcttgttgtcgcgagcgaactcacgctcaccctggtagacctgaatcagcacggacggctggttgtcttcagcggtggagaagacctcggagcgcttggtcgggatggcggtgttgcgatcgatgagcttggtcatgatgccacccttggtctcgataccgagggacagcggggtcacgtcgataagcaggacgtccttacggtcgcccttgatgacgccggactgcacggcggcaccgacagccacaacctcatccgggttcacggactggttcgcttccttaccaccggtgagctccttgacgagttccttgacggcgggcatacgagtggaaccaccgacgagcaccacgtggtcgatgtcgctcacggagatgccggcgtcgtgcagcacgttgttgaacggcgtgcggcagcgacccagcaggtcggaggtcatttcctcgaagtgcgcacgggtcagagtctcatccaggtgcaccggggtgccgtcaggggtcatggccaggtactgcatggagatgctggtggaggtggaggaggagagctccttcttcgcctgctcagcggcttccttcagacgctgcagcgcgatcttgtccttggacaggtcgacgccgtacttgttcttgacttcggaaaccagccaatcgatgatcttctgatcccagtcgtcaccaccgaggtggttgtcgccgttggtggcctgaacctgaatggtggagaagccgtcgtcatccttgccaatctccagcagggagacatcgaaggtgccgccgccgaggtcgaagaccaggatgcgctcgtcttccttgcccttctcaaggccgtaggccagagcggctgcggtcggctcgttgatgatacgcaggacgttcaggccggcgatcttgccggcgtccttggtggcctgacgctgggcatcgttgaagtatgccgggcaggtgatgacggcgtcggtgacgggctcgccgaggtaggcctcagcatccctcttcagcttcatcaggatctgcgcggaaatctcctgcggggtccacttcttgccgtcgatgtcgacggtccagtcggagcccatgtggcgcttgacggaagaaatagtgcggtcaacgttggtcacggcctgacgcttggccacttcgccgacgaggatctcgccggacttggagaaggccaccacagacggcgtggtgcgcgcgccttcagcgttgacgataacggtgggctcgccaccttcaagagttgcgatgcaggaattcgtggttcccagatcgataccaactgcacgtgccataatgtgtgctccttaattactcgtttgttcttacgttctttgcccaagttccgattggtcgtctcttggaccttccaaacttgagcctacatcactcaacttccatttggcaagttctattcccaatttcaacacaaaaagttgagtatgtttggctcaagttttttgtgggagtgactgacggcgatgacggagtggtgcgtttggagccaaaatccacttatacagaaaactgcaaggggtgactggggcgcgccatcagccttgccatcagacttgccagcggcggcgcgcgattgcggcgcatggggtgtgtcggcgacgttattgtcgctgggggcatcgatgcgctgaataactcagacacagtgtttgtcgccgattttctgcgggaattgtttggcaatatcgccaggtatgccgattcgacgcagcgttacgtggtgctggtttccgccgctcaggaccgcgtcaccattgatgtgacggaccgtccgcgtcaaggtgacgcgacgtttgagggggcggcattccgggcttgcgtactatcgggagcgtgtgctgcatgcgcacggagattgggatgtgcgggagaaacgcgggcagtgggtactgcatgcttcagtgccggtcgataacgctggctaatcggcaacaccggctcatcaataacgccggctaattgataccgccaatcactcgataacgccagccagtcaataacgccggtccccggccgcgccggcgtgggtcgcgagcgaggccgccatcgcgaccgcgcagaccgcggcggccaccgcgacgcccttgtgctgtttcaccttgtgcatgaaaagttcctttccactgaccgcacgatgagtgcaatcgcgaaggccatcccacgcactgcacccggtatgccacgctcttcggcaaccatgccgaacttatcgccgcataccggggcgcacccggatgttgcagaaaactgcaaccgggctcagctgcgcagcaaaatttcttcgagcgcgccggccaccgcatcgggcatgtcggtgatccagaaatcgttggcgtagcgcggaccacggttcatggtgcgcagggcgccgatcgcgccgatgccgagcttgtggaccgcctgcagcgcgagctccttggtgcggtagagcatctgggcgtgcagcagtaggtccatcgcgtccgattcgaccggattgtcggcgatgcgcagaccgccgggaatctcgatgcgcagactggcagccgagctgatgccggtgacggacacggtcaggctcatggtcgcctcgtcgtacgccaccgtcgcctcgaccggagcctcgccggaccatgcacgcacgccgctggccgcgtcaaccggcgcgacgccgcggaacacgaccgtccagtcgcgcaactcgggtacggcggacgtatcgccggtaaccggcgcgacggtgaaggcgctgggcgacgcatcggccccgccccacgtgaacgctatcgcggtgtcggcgctgggggcgccccacgtgccgcgatcctcgcgcatgacgaacgagccgtcggcaccagggaacaccagcacgcgcagggcctgcgggttggcgatagagttgatcgcttcgccggattccgcgacgtcctgcaacggcacgatcgcgccggccttggcgaacaccggcgtgcggtcgagcgagcgccagacctccagtcggcggccagcggcgtcggatgagacgtatcggcggccgtcgaagaagtcgaaccactccccctgcggcagccaggcgtcggcgcggccgcggcaggcggcggcatcgtccggggagacgatcggcgcgaccacgagctcggtgccgaagcggaactcatccggcacctcgtaggcgtccggcgtatccgggttctgccagtacatcggctcgaccagcggacggccggcttcggcggcacggtagttcatggtgtacaagtacggcatcatcgcgtggcgcagacgcagcgcgtccaccatcgcggcgctcacgtcacggttgaagttccacggctccttgccggagaacggcgagttggacgaatgcagtcggttgatcgggctgaacgcgccgagctggtaccagcgggcctccagctcttcgttgcggtagccgaacatgtggccgccgatgtcgtggctccaccagccatacccgatgttggaagcggtggcggtgaactgcggctggaaggcgagcgattcccaggtcacgatcgtgtctccggagaagccgaccgggtagcggtgggagccggggccggcgtaccgggagaaggtgagcggccagttgccaccgcgccctgagtcgaggtagtgcatgtggttgagcatccacagcgggtcgagacccttctggcgggtcacgccgccctgctgccagtccagccaccagaagtcgacaccttcggcctccatgcggtggtgcatgtcgaaataggcgtccacgaagtccgggttggtgaggtcgaattccacgttctcctcggtggccgggtcgatgccgacgcgcttggcgacttcggggtaggcgtcctcgaacgcgcgcacgccgtcgcgcgggtggacgttcagtgtggtgcgcaggccgcgccggtgcaggtcggcgaggaaggccggcgggtcggggaacagttcgcgattccacgagtagccggtccagccggaaccgtacttcgggtccacgtcgtccacgcgatgccagtccatgtcgatcacggaggtggtgaacgggatgccctcgcgcttgaagcggtccatcagggccagatagccgtcctgcgtgtaccggtagtagcggctccaccagttgcccatggcgaagcgcggcaggagcggcgtggggccggtcaggcgatagaagtcgcgtacggcctcgatgtagcggtggccatagccgaagaagtacaagtccgtttcggcggtggcgcgcggggatacccaggtgccgaacgggttcgccttgccgttcaccgtgtcggtttcgatgatgatgttggcggcggaatcgtcgatgacggcccagccatcgcgcgagatcacgccgttgtcaagctcgatggcgccgtccgcctcgtccagcgtgcgggcggtgcctttgaggttgccgcgctgggcgtcgccgtaatgctaggtgttgaactgggtgtcggccacgcctttgacgaccacgctcaggccttccttgctgaacggctgctggtcgtagacgatggtcagggccgcggtgtcgatgatgacgcggccgtcacgctcggtgacgcggcgttcgactgggctaccgaaatcgcggttcaggacggtctgggtcgggcggttctcgaatacgccggaatcggaccattctaatcgcacgagcgaatcggtgatgagtccgatgcgccagtgctcgccggacaccacattgtcggcgcgcatggccggcgtggcgtcgaggcggaagtcctgcggatcgggcgaggtcggagacgactgcttgagttgtggtgactgtgccatggttaccccttctgtacggttattcacgatgatacgagtgatgcggctgcggctccccgggactggtgggagactgcggcgcggttcggattcggccgaaaccggccgggtttacttgccagagccggtggcgatgccggcgatgaactgcttctggaacaccaggtagacgatgaccaccgggatgatggtcacggaggtggcggcgaacagtccgccgtaatcggtgccgtactggccggagaacatcttgaggcccaccgacaacagctgcttgtcgtcatcggtgatcatgaggaacggccagaggtagtcctcccagttccacaggaaggtgaagatggcgagcgcggcgatggaattgcggctcatcggcagcaccacctggtggaagatgcgccagtcgctggcgccgtcgaggcggacggcgtgcgggcggagcagggcatcctcggagttgtggacgttgaacagcacgggggcgttcttgttgcccttgagcgagagcggggtcttgacccagtagtcgctccaagccacctgcgagatcttgaaggtgacgttcgggtggatcttctcgtactcgtggagcatggagatcaccgggtcagtgctttcgtcgccccaggaccagtagcccagttcgatgggctggccgtcgttgaccaagtggttggggtcgtaggtgatggtgtcgcccatgacggccaggcccttgtcggcctgggtgtcgacgacgcctgacgaaccgctcgaactgcaaccggttgcaagtgccataatgctcacggttgcagtcagcgcggcgagagatttcttgatcttcattatctcccttacttcctcgcaagctctaagtgaacacggttcagtatacgggtgtcgaactagttcggcaacccggctttctcagccatgcaaaccgttacatttgcaacctgttacattccaaagctattgagaccatattggtctatattttcggcgtgtcgcaatatcgcaacccattgcactatgactgtcgtaaaacgtactgcaatgatttacaatgaagagaagtttgtcacaccgtcaactttgaaaaaccgggaggggccatgaaagccagcatcgaggacgtcgccaggcaagcaggcgtctccaccgccacggtctcccgcgcgttctcccgccctgacatggtctccgccaaaacgcgcgccaaggtgatggaggccgcccaacaactcgacttctcggtatcccgcatggccggcatcctcaaatcgggccgctcccaccgcgtggcgctgctggtgggcagcagcaagctcgactggttcacctcgcgcatcatcgaaggcctcaacgaagtgctgcgatcggccggctacgatctggtcatccaaccgatcggcgacgcgggcgcgcgcgaggagttcttcgacgaactgccggtgcgcggcaacgcggacgcggtcatcgtctcgtcgttcgccatcaccccggccgaaatcaggcgactcaacaccacgcggatcccgctcatcggcatcaacacggcctcgcaggggttcaccgcctccgtgggcatcgacgacaaggccggcatccggctgatcgtgcgccatctgaccacgctcggccaccgcaacctgttgtatttgtacgagacgttcgatgccacgatgggcttcagctcgcacaaccgcgtcaccggattcctggaggcgtgcagcgaactggacggcgtgaccggccagacgatggacatgcaggccggcgacgatccggtcgacgccgccctcaccgcgctgctcgcgcgcgacgacgccccgactgccctgtgcttccatcaggattcgctggcgattccgctgttcttccgcctgcgccaatgcggcatggcgattccgaccgacctgtccgtcaccggattcgacaacagcacgttctcgggcgaggtggggctgaccaccgtgcgccagaagccgtacgacatggccgtcgccgccgcgcgcaaggccctggaccttatcgaggggcgcaccctggaccagccgcacgagatcttccccgtgcaactgctggtacgcgactccaccgccgcgccgcgggtgcgcggctgagcggggccgaatcagtcgttattcgggccgctgttgtcggactgggctttgccgttcctgcgagctatcgccatgaacgtgacgccgacgatgacgggcaggaggatggcggcgagcgttgcggcgcggcggatggcatcggacgttgcctttccggacttggcgtcgcctgacttggcggacgctgcggaatcggcggacttggcggcggtgtcatcgcccttatgcggtgtttcgccggtgaaccaggcgggatcggacggatcgtatttccgggtgccggcccagtttgcgggcgtcgcgccggcgtatagggcgacggccgagcccttggccacggtggcggtgaaggtgccggccacggcgttgcggaagccgatcatgccgcggatggcggtccagcgttgcgcgcagtgccaggtgccggcggtttcgatgccgtcggtcggacaggtcatgtccggcacggaggtgcgggtggcgccgggagcgccgtcgtcgacgccggcgtagtagtagccggagaagatgtgcggctggccgtaatcgtaggcgagcatgaaggcgttggcgagcaggtagctggtgccgtcacgggtggtgagcgaggagccgttgcgctcggtgtcccagttggtcacccatacggccgccttatcggaatccacccaggtcggtccgccgatggcgtccaggccatccgaacgaatcgatgcaggccggcttcgacatggacctctacctcgactggcgccgggacggccacccgaacggctacaacctgttgctgcgcaataccgacacgcctatggagcacgaaggcgattccagttatttcaacgccgattcaggtgcctcaatcgcctcattcctcacggaatacctgccggacgagctctcttccgacgccgacgtgctgctcagtcttggtgaaccggccgtgagcggcgggcagctgacgctctccccgcaatcgttcgtcgtgtttggttaaacccgttcgacctcacctccgccggcgaggctgtcggcaaagtcgactggggatagtcaacgggccatcacgacaaacaccaacacctctagcctcgtccaactcaccgaatgtattgcaatcgttgtcaatatgagttacggtagaggcagaacagctcgaacattggtctgtcaggttgccggaacctcaacgcagagcggccctcgaacagcaatgcaaacgactagcagtacccgatttgcaagcaaggagtcatcatgaccgacgcatacggcaacgacgcagcaaccagcaccggcaccatcgcagacaccaccaacaacgccgcttccggtgccccgcagcgcgcggaaagcacggaacgactcgcccgcccgctcatcaagctcgccaaagcctgcggacttgccacctcattcatcgaccagctcggcacctacaccgaaatcagcgacgcggccttggtcgccgtactcaaggccctcgacgtggacgcatccagcgacgaggccatcgtacgctccatgacccaacttgaggtggaaaacagcaaacgtttgctcccctccaccatcgtcgccaccaccggcaaaccgaccggcatcaccctgaactgctcgtcggacgcggacatcaccgcctccatcgaactggaggacggcaccgcgtttggccactttgccctgctgccgaacctcaattccggcaagccggacttgaccatcgcacccgacctgccgatgggttaccacacgctgaccgtcacggttgacgggcgcgagggcaaggcggccatcatcgccgcccccgcgcgcattcccatgccggaggcggtcgccgagcaccagcggtggggctggatgacgcagatgtattccgtgcggtcccgcgaatcgtggggcatcggcgattacggcgatctgaagcgtcttttggcagatgccgccgagaagtccaaggccgacttcatgctcatcaatccgattcacgccggcgcgccgattccgccgcttgagccatcgccgtatctaccggaatcgcgccgattcctcaacgtgacgtacatccggccgcaggatatccccgaatatgccacactgccggccgacgtgcgcgcgcaggtggatgcgctgcatgattcggtggccgcgcgcaacgacgaatcgaccccgatggacatcaacgcggcgtgggaggccaagcgcccggcgctgcgcctgatcttcgaagcgggccgcaacaacaagcgcgagctcgaattcgagcatttcaagaccaccgccggcccggacctcgattccttcgccacatggtgcctgtgcttcgaggtatggggcgcgccgtggggcgagaaccgttggttcttcgagaagaccatcgacgacccggccgtgcgccagctcgtcgaggagcaccacgacctgttcgagttcaaccgctggctgcagtggatcgctgccgagcaggtgaacgccgcgcagcaggaggcgctggaccacggcatgacgctggggctgatgcaggacatggccgtgggcgtgcacgggctcggcgcggatgcctgggccaatccggaacgcttcgcctcaggtggcgtcacggtcggctgcccgccggacttctataaccagcagggccaggattggggccagccaccgttcaacccgcgctacctggaggccaccggctaccaggtgtaccgcgagatggtgcattcgatgtacgagcacgcgggcgcggtgcgcatcgaccatgtgctgggcttgttccgcctgtggtggattccgcaggggctcggtgcccgcaacggcgcatacgtgacgtacaaccacgaggcgatgttgggagtactggccatcgaggccacgcgcgccggaggcatggtggttggcgaggatctgggcaccgtaccggattacgtgcgccgcattctggccgatcacggcgtgctcggcactgacgtggaatggttcaaccgcgtggacgattcgccgaacgccggcgacccgtaccgtgcacccaaggactatcgcaaacaggcattggcctcggtgaccacgcacgatctgccacccaccgccggctacctgaacttcgcacacgtcaagctgcgcgaggagctgcatctcctgagcgagccggtggaggcattcgccgcctcggcgatggccgagcgcacggccatgatgaaccgtctggtggagaacggctatatctcgcagaccgtggcggatgatgtggaaggccatgtgcaggaaatcgtggaagcgatgcacgccatgctcaccgatacgccgtcgctgctgctgcaggcagcgctggtggacggcgtgggcgaatgccgctcccagaatcagccgggcacttccagagagtattcgaactggcgcgtgccgctggcggacagctcaggccacgtggtacataccgacgaggtcttcgacctgccacgcgtgcagtccctagccgccgtgatgcgccgagagaagcggtgatcgattccggcaatgggaaattggtctaaatcagcccctcgtaatcgagatagccgaagacgatgacttgttatgggcatgttatcgttgtcatgacaatgattgttcgcgacggcgaaggagcgacggctatgaccaaggcaagcattcaagcggtggcccgcgaggccggcgtttccgtatccacggtgtcccgaaccttcgccaagccggatctagtgcttccagagactcgagaccgagtgatgaccgcggccgaaaagctcgactactccgtctctcgctcggccgccgcactgaagtccggccagtcgttccgcattgcgctgctggccagcgagaccatcaccacctggttcaatgcaaacatcttcgccggccttgactcggcgctgcgcccctccggctacgacactgtgccctaccccatgcgcaacgccgccgagcgccatgacttctttgcggatttgcccgtgcgacgcaatgcggatgcggtgattgtcagctccttcgacattgagccggctgaagtggagcgactgaagcatatgcacgtgccgattgtcggcatcaacattccctccaccgatgggttcgacgcaggcgtgagcattgacgattacgccgccacacgttcggccatcgagcacctgattgcactcggccaccggcatatcgcgttcgtcggcagcgccccgaccgaaaccaacatgcgctacagtgccgaggctcgtttgcagggcgtcattgatgccgctgccgcccatccggggatcgagctaacgcccctgagcattcaacgcggtcttggcgaaagcaacgcggcattgaacgccgtactgaacgcctcccccagcatcaccgccttctgttttgaggatgatgaaatggccgcacccgtgctgtatcgcctgcgtcaatacgggcggcgggtacctcaggacatctccatcatcggcttcgacgattccaccctgtccgccgccgtgggactgaccacactgcatcaggacccgttcgcaatgggcgtggccgccgggcacatggtattggatgccattgcgggcaagtcaatcgaaccggcattcgtacggccggacactccgctaatactgcgcgaaaccaccgcgccgcctgccgcaacagcagcgtccgcgcaggcgtgactacgttaccaccgcaaaacgccgataaatcgacttttgcatgcgtaattcacatgatatcgttgtcatcatcaatacaacggttgggccttcacacagcagttcgagcgcaaccggaacaacccaaccacaacgcacccggaacaggaaggaatcggcatgaccgccaacaacctcaatgacgactggtggaagcaggccgtcgtctaccagatctacccgcgcagcttcaaggacgtcaacggcgacggactcggcgacatcgccggcgtcaccgagaagatggattacctgaagaacctcggcgtcgacgcgatctggctctccccgttctacccctcggatctggcggacggcggctacgacgtgatcgactaccgcaacgtcgacccgcgcctaggcaccatggacgacttcgacgcgatggccgaggccgcgcacgaggccggcatcaaagtgatcgtggacatcgtgcccaaccacaccgccgacaagcacgtgttcttccaagaggccctcgccgccgagcccggctccccggcgcgcgaccgctacatcttccgcgacggccgcggcgagcacggcgaactgccgcccaacgactggcaatccttcttcggcggcccggcctgggcgcgcgtggccgacggccagtggtatctgcacctgttcgataaggcgcagccggacgtcaactggaagaatccggacatccacgaggagttcaagaagaccctacgtttctggtccgaccacggcaccgacggcttccgcatcgacgtggcgcacggcctggccaaggatctcgaatccaagccgttggaagagctcggccgcgaatacagcgtggtcggcgtgctgaatcatgacttcagccacccgctgttcgaccgtcgtgaggtgcacgacatctaccgcgagtggcgcaaggtgttcaacgaatacaacccgccgcgctttgccgtggccgaggcgtgggtggtgcctgagcaccagcacctgtacgcttcgatggacgagctgggccagtccttcaacttcgacttcgcgcaggccaactggtatgccgacgagttccgcaaggccatcgccgcgggtcttaaggcggcggccgaaaccggcggctccaccaccacgtgggtcatgaacaatcacgacgtgccgcgcagcccctcccgctacggtctgccgcaggtcaagggcgcgccctaccaccagctgccgcacgactggctgctgcgcaacggcaccacatatcccgaagaccgcgagctcggcacccgccgtgcccgtgccgccgcgctgatggagcttggtctgcccggcgccgcctatatttatcagggcgaggagctgggtctgtttgaggtggccgatattccgtgggatcgactggaggatccgaccgctttccacaccgctcaggccacgatggataagggccgtgacggttgccgcgtgcctctgccttggaccgcttccgacgagcccgctctggccgatttcagccgtccggctccggccgacgatggcaccggcgagaaccatgtgccgctgtgcgccgccggccagttcggcacgggcgcttccttcggcttctcccctgcggttcgcgccgatggcgtgacgccggccgccgacccgcacctgccgcagccgctgtggttcaaggattacgcggtggacgtggagcaggccgacccggattcgatgtacacgttgtatcatgcggcgttggcgattcgtcaggagtcgctgaccgccacgcgcgacaccaccgccgagcaggtggatatgggagcggacgtggtggcgtaccgccgtgcggcggttgagggacgcacgttcacctcggttactaactttggcactgccccggtctcactgcccgaaggctctgtggtgctcacttccggcccgctgactcccgacggccaacttcccaccgacacctctgcgtgggtaatcaagtaaatcccttggaataagcgaaaggccgccgttccgaatgaatcggagcggcggccttttagtatgcgctaatcagcgaaaatcactgaacctgggcgcgggcgatcttgccggtgaaggagttggcctcgtcggcatccttgacgccatccttgttccaggagaacatggcgcgcagcttcgggccgacggtctcgatgcgctcgttggagtacttctcctgcagttccttgaagtgcggggcgccggcatcctgatcgtcgatgaactccttggcgaaggagccgtcctggatgcgctgcaggtggtattccatgcgcttgcggcagtcctcgttgatgacggtgttgacgtagtcgccgtactgggcggtgtcggagcaggaccaacgagccttgttcaggccgccctcgttcatcagatcgacgagcatcttgagctcgtggcagacctcgaagtaggcgatctccggctggtagccggcgtcggtcaggacttcgaagcccatctcgacgagcttgttcacaccgcccatgagcacgttctgctcgccgaagagatcggtctcggtctcttccttgaaggtggtcttgatggcaccggcgcgcagagcaccgagggccttggcgtaggccagggtcagagcccaaccatcgccacgcggatcctgctcgacggccacgacgaccggcacgccacggccagcggcgtactcacgacgaacgatgtggcccgggcccttcggggcaaccataaacaccgggtgatcctcagacggcttgatgtagccgtagtgaatgttgaagccatgagcgaacgcaacagcagcacccggcttgatgttgggctcgatgtcgttggcccagatggtgcgctggtactggtcgggggccagaatcatgatcacgtcggcctcggcggaagcctcggccacggacttgacctcgaggccctgctccttggcgaagtcgaccgacttggaggtcggacgcaggccgacgaccacgtcgacaccggaatcgcgaaggttcagcgcgtgggcgtggccctgggagccgtagccgatgattgcgactttcttgccttcgaggacggaaagatcgccgtcgttctcataccagatttgtgctgccattattggcactccttttcagtagtggggtgtggcgccgctgggcgccgggggtatctacggtgtgcagataagtcctgttttgcgaggattgtgtccttcaaaccgagttcaatcctaccgagaacgccgtcgcagccccgctggagtccacaacgtgagctaggtcactattggagtatggacagccgtgtgcagagaacgattctcgataacaactctgcacccttttgaacagaatcgcacaatcccacatatggggaaaggctgagatatcaacgaccttgcatattcggtgttcgtttgcctgcaagaaatcagcgcatagttgttattgagaatgattcgctgcgcgcaacaacacaaaaccgccgctcccgtatgggcgggaacggcggtttgctagcttaaatccccttcaggggcggcaatcactgaacctgggtacgagcaatcttgccgttgaaggactcggtctcatccttgtccttggcctcggcgttattccaggagaacatggcgcgcagcttcgggccaacggtctcgaggtgcgggtgagagtactcttcctgcagcttcttgaacttcggggcgccagcagcctggtcatccatgaactccttggcgaaggagccatcctgaatgcgcttgagctgatactgcatgcgcttcttggtctcctcggtgatgacggtggaggtgtagtcgccgtactgagcggtgtcagagcaggaccaacgagccttgttcagaccaccctcgttagcgaggtcgaccagcatcttcagctcgtggaacacctcgaagtaggcgatttccggctggtagccagcctcggtcagcacgtcgaagccgaggtcgcacaggtggttgatgccgcccatgaggacgtcctgctcaccgaacagatcggtctcggtctcctcggtgaaggtggtcttgatggcgcctgcacgcagagcgcccagagccttggcgtaagccaggcacagcggccaggtcttgccgtccgggtcctgctcaacagcaacgacgaccgggacaccacggccagcggcgtactcacgacgaacgatgtggcccgggcccttcggggcaaccatgaacaccgggtgatcctcagacggcttgatgtaaccgtagtggatgttgaagccgtgggcgaaggccagggcagcgcccggcttcaggttcggctcaacgtccttcttgtagacggctgcctggtactggtcaggcagaagaatcatcacaacgtcagcctcagcgacggcctcaccaaccggtttgacctcaaggccctgctccttggcgaactccacggacttggaggtaggacgcaggccgacgaccacgtcgacaccggagtcacgcaggttcagcgcgtgggcgtgaccctgagaaccgtagcccaggatagccaccttcttgccatcgaacacggacagatcggcgtccttctcgtaccagatagttgctgccatttttgacgctccttttatttatttgtttatttatggggttgaatttttcttgcgttctgcggggtttcgctgagcgatattctgttgtggctttccttgtgggcttttccgatatgcaggtttagtcccgtcgcatcggaaaagccctgtaggggttcacttagtggaattaggggttttcacgttgtgaacatcgtcacttggtaaagtcaacgtccttagtctccttgcaggtgagcacggagacgaggcagcacacggccatcacggcaaggtagaggcccacggagtggacgccccagtgggagctcagccaagtggcgatggtcggcacgaaagccgcgccgacgatggcggccaggttgtagccgatgccggagccggagtaacgcacgttggcgtcgaatagctcaggcaggaaggcgccgatcgggccgaaggcgatgcccatcagggcaaagccgacgcacaggaacaccatgttggcgaagaagttcttctggccgaccagaccaccgtccagcaggaacgggaagagtacggcgaacaccacaagtgcgcaggaggagaaggtcagcacgcgacggcggccgatcttgtccgcgtacaggcaggacagcacgatgaacagggcgaacacgcagatggagatcatgagcatgagcaggtattcctggttggtgaagccaaggttgccgccgccttcgccctgctccttggtgccccaagcgagggaccaggtggcgagcgtgtagaacagcgtgtaggtcacagccacaaggaaggtggcctgcagcacctgacgccaagacttgcggaagacctcggtcagcggggacttgacaaccttcttctgctcctgagccatacggaagatcggggtctcctccatgtgaacgcggatcacgagaccgacgatcaccaggatggcggacagcaggaacggcacacgccagccccaagccagcatcgcgtcctgattgttgaaggattcgagcacgaagtaggtgccgttggacaggaagaagccgatcggggcgccgagctccgggaaggagccgtacagtgcgcgcttgtcttcaggcgcgttctcggtggcgaccagtgccgcgccggaccattcgccgcccaggccgatgccctggatgaaacgcagcaggcagaggatggcgactgcaccaacgccgacctgatcgtaggtgggcaggcagccaatcaggaaggtgccgacacccatggtcatcaggctgacgaccagcgtggtcttgcggcccatgcgatcgccgaagtggccgaagatcagcgagcccagcgggcgggcgatgaaggcgacggcgaaggtcagcaagctcatcagcagtgcgacggtggggttgtccttcgcggagaagaagatgtgcgggaagtagtttgccgcggcggtgccgtaggcgtagaagtcatagaattcgatggcggtaccgaccatcgacgcggcgatcacggtcttgaccgaatcgcgtaccaaggtagcggctttacctgccgcctgccctaagccagtctcttcgactgctgcagtcattgttactcctgttttgctctcgttcactctcatcggcgggcgattatttcgccccacagggaggttgttgttctgtcgctgtgttgttgccgtgtactgtccgctaccgtttccgtctgcgggattctgccgtaagccttgtgagcgcaacaaaaaaagccccgcatcatgcagggccgtgccgattgtgtcagcttgattggccctgccttcgttgacggggcttcaagcatcagtgccgaattagtccgccagcgaagacgggctaataattcgtgcggatacaaacgcagaagcattgaatccagtcatcgcgtggcctcctttcggtatttcctcaggccgttcgacctgaactggaatgtaaacataggtttgtatgtcttgccaatccagcaagggttcacattgtggacattgtgacgtaggagtcatgtgagatgggtgactgtgggcggccgtgactcggctcccctcagtcgcctacgccgccagctcggccgcaattacagacgggctaccgcccgcagtctgcctgctcgcctcccggctcgccttcgcctacaaacagtccactggactgtttgcttcacagctcagcctcagagaggggagccaagataggagtcaccgggtggtttcgccggggatgagggctacggggatgacttcttcgggagtgggttgggtgtcaacgtccgaagcgctatcgttcttggacggagaggcggggccaccgtcggcggcgatctgtgagtccatgcggacggcgagcgcggcggcgatggccgggaagtcctgtcgaatcgcggtcaggcgtttgccggcggtttcggccatgagagtgccgtcataggcgatgacttgcagatcagcaggcacctcgataccccgtcgtgaggcttcctgcaatgccacggatgccaccacatcggagccgacgatggcgtcgacatcaggatactgttcgaaaatggcgcatgcggtggcttcgtgggcggcgatgtcggccacggtgccggcttcgacataatcgcaggcaatgccggcctcagccagcagacgctcgacggtgagatggtagcgaatcgtggggaaagtggtgccttccgcgaactgggaacgcgggccaccaacgagcaccacgtggcgcgcgccggaatcgatgagctggcgcgcaatcagacggcctccctgttcatgatcagaccggacgaccggcacaccctcaccgagcgtgcggtcgaaagcgacaattggccgatggatggaggtccagtagtcggccggatgctcggtgtgggccgccatgatgatgccgtccatcatgtgccgctggagcatgtcgatgtactcgctctcgcccttgtctgtatcggcggtggagcagagcagggttttgaggtcgcgcgcggcgaactcgcgctgcagatgcgcggtgagtgtggagaagaacgggtgggcgatggtcggcatgatcacgccgatggtgttggtgcggtttcggtagaggttgcgggccagctcgttgggaatgtagttgagctggcgcatcgcggactcgactttggcacgcatatcggccgagacgtagccggtgttgttgaccaccaacgaaacggtgcttaaggacacccctgccgctttggctacgtcgcgcatgccgaccatggttttgctcccctgcgagtactggactggatcactgctgaccagtgtactcgaaccggtttattattcggcagatttggtggtgagggtgacgattccggccagcagcaccatgacgatggcggacgggaagagcaggtaatagccgaagctatgctcgaaggcgttcaccagtagcgcgccgatgatggcggcgagcgccagaccggccgagttggcgagcgcataaatgccgaggtcgtggccggctcggcgcgggtcgggcaaagagtccatcaccagttcaagtccgagcgaatcatagacgccaaaggcgaatccggaaatcaacgcaaacagcagcatgccgttttcacgggcagtgccggtggaccagacgccaaggccccatgcgagcgccaaaccagcggcatacagcaggcaggcaccggccaccacacgggccacgggaatgttcttttcctcgattcgctcggaaatcggcccggcggcccaggaggcgagcgcggcaccgatcaatgtggccacagccataccggcaatgaggaatccggccggaatggtcagcggcgcggacgtaagtaccacggccttgccataaacccagaaacgtacgagataccacagaaacacaccggtcagcccaacaccggccatcatgcacgtacgggcggcgaacacccgggagaactcgggagcgtgggccggcgggcgcaattggtcaagtacctgactgcggtcaaaaagctggttcggctgctcagcgctagaaggctccttgggcagaatcaatacggtggcaataccggacactgcaaatagcacggcggtgtaactaaacggcgcaaacgaattgaacatcacaccaagcgcacccatgcacacgccaagcgcttggccgagcatcacaccgatgccatgccagcgttcgatgcgagggcggaacttgtcgggcacccgttcgctgatggcgctggtcaacggcacggaaagcatcgcataggcgaactgtaggaacacccagaaaatacaaagcacaatgatgccgatattctgccccagaatcagcgtgatcagcgcgcacagcacgccacccgccaccatccacggggtacggcggcccagaggaatacgtgtgcggtcggacagcgcggagaccaagggcatcgcgaacatggaggccaccacgccaacgaccaccagcacggccagaggcaccaccaagtcagtggcgacgggcagcggacggccggtggacggattgatggtgaccgatatggcagaagcggtgtcgtagtcgaacaaacgcgccacggcgttgggcatggcgatggtgttcaacgccgcccaaggcgcgccggccagaatcgaagccacgaaaaagccccaattaagacgggaaatctgaacagcggtgggtcgctgaccattggcggcgaccatcggatcgcgcatatcgagatatgcagacgacagatcaggcgcaggggcatccacgctggccgcggcagcggcagcagccgacgaaccggcggccgccagacgcacggcctgggcctcgggctggtcggcggatgcctcgggcgggcgacgacggtccttgatggccagtcgggctacggctgccttgtcttcggggctcagggccttgtcgagatccgggcggtcgtcaatacccgggcgcacgtacggttccaacatgttgctgctctttctttgctctcatcaccggcgggaggtaccggccagctccgactgagcatgacccgcaaccccgccacatgcaaaaccgcccgagcgcactagcttcagtgcactgcgggcggtttgttttccatgaacccagcttacgccgggcgcactacttggagcgcgcacagcggagtgacgtttatgggccaacggttagtcgatatcggcaatcggcgggttggcgagcagatcgtgggtttcgtggtcgccggcggcatcgctccaggcaaggctggcgaccggggtggcgttgtctgtgccgaggccgcgtccgggctcgaaggtgagggcggccgtggacgcgccgtcggcggcggtccagcggaaggtgatggacgtgtcgccatcgacctcgtagctgaactcgccatcgaatgcagacagctcgttgcggaacttggccagggcgttcagggccttgaccaccgggcgttcgaggttttcatcgatttcggcggtggagtagtagtggcggttgatgtcgcggccgttgttggtgcggcgcagcagttccatgtcgttgcggccggcgagcgcgcccacgtagtagacctgcggcacgcccggcaggaagaactgcacggcgcgggcggccaagtagtgctggtcgttgcagccgagggccgagtagtacgtggagttgacctggtagaggtcgaggttggacgcggcggcaccggtggcggcctgggattcgccgtgggtgttggcatggatggtgttgaccaggttgtcgacgtcctcgtcgggcacgaggcccttgagggagcggtcgagctggtcggagccgatgtcgatcacgccgatgccatcgtgcgtatcgagcacggtgacggcgttgttcgggcggatctcggtccagtgggccacgggttcgacgtgaccggtgaacagcgagtgcagaagcagcggcggcagggcgaaatcgtagacgcggtccaccttggaggcgatctccacctgcttcttgtaatagctgtgaacctcgatgaggatttcaaggccgcgcttgacgccctcctcgcgcagacgggagatgagcttaaaggtcttgggggtcatgaagcagctggtgctggcttccttggcgccatagccgacggcgtcgaggcggatgtagctgacgtgagaggcggccatctggtcgaaaatcgacatgaggtattcccagccctcgtcggaatcggtgtcaatatcaacctgctgcggggtgaagctcacccagaccaagcgcgtcttgccggcgaacttgtagtgggtgaacggcaggcccggacgcggacggtagatgccggccaggtcctcttcggtggcgccgttcgggaacacggagctcatggtcagaaacatcgggtaatactcggattcctcacctttttcaagcacatcttggaactgcttggattcccaactcatgtggttgacgatggcgtcgaccatgatgttgtgggtcttggagagttcggcgacgtcgtcccagctgccgagacgttcgtcgactttggtatggtcgatcgggtcgaagcctgcatccgcaccatcgaacggagtgaagaacggcaggatatgcacgccgtcatacacgccgtcgaagcgggtgcgcaggatgtcggtcatcgagctaagagtgccatcgccgagacgatcggcgtatgtgatgagttgcactttgtttttcatgggacctcccttggctcatgggcgcgggtgcaatttgcgtgcgcatctgcctgtttgttgtttacgtatttgcatactcacgtatgtatcgaaccggttcgatattacctcgaaagggacgtcaatgtccagtcgcgcagtgaaatgcgcgtgtcgaaccgattagatgcggtgttctatgcagcttagcctgtccgactccaatgtgtccgattgataacgcccggtttgttgcgcattttggttgaggcttgagttgagagacatggtccgtcgtccgggtacgatttcagtcgccaaaccaaatcaacctatttaggaaggcgacggaaccatgccgaatcagattctacaggtcgacgagaacatgctcgagacgaagctggaccggttggtgttggagaaggtcgaacagctgttgaacgcgatgctggacgcggaggccgacgagatcacgggcgcgtgcaggcgttcgtatacgctggaatgcaagacgaatgcggccagacgcgcgctcgagggcgagcccctcgcccgcgtggcgcgcgacgcgggttgcacgccgacgagcgtgtaccagtggatgcgccgctaccggagcgaggggatactgggactgatggacaggagaaacgcgccgatgccggccgaaccgatgcccgcggccggcgatgacgtggaggagctgcgccggcaggtggaggtcctgcggctggagaacgcggtgatgcgggagacgatcgatgttttaaaagccgacgacccgcgcctcgacccgtccatgctgacgaacagggagaggacgcgggtcgtcgacgcgatcaggggtgaattcggcctggcggcctgtctgaaggccgtgggactgaaacgcagcacctactattacgagcgcggcgcgatcgccgcgggcgacaggtacgccgtgctgcgggcccgcgtcgccggcctgttcgagcagggtgggcgcgcatggggataccggaccatccaccgcatgctgcgccttgacgagtccgacccgatcgtcgtctcggagaaggtcgtcaggcggatcatgcgcgagggggccatgcggcccgtgtacctgaagcggccgaagcggtggagctcctacgccggcgagatcggcgaggccccggcgaacctcgtggagcgggacttccacgccgacgcgccgaacatgctgtgggtcacggacgtcacccagttcaccatggacgggtacaagtgctggctttccccggtggtcgactgcttcgacgggatggtggtctcctggaccttgtcgcgctccccgaacgccgacatggcgaaccggatgctccttgacgcggtcgccacgctcagggacggggaacatccaatcatccattccgattaagccgggtttgttgttaagccggggaacggttcggggtcttggtggctggccgtgtcccatgtggtttcccggcttaacgttccgggttatttgagggtgtgtagttgtcggagtcgttgctcgctgagccatgtctccttggaggggtcggggccggggttggccgcatcgacggctttgcgcatcatgtcgagggtcgcgaacgcgtagaacgcgctggttgtgctcatgctttcgtggccgagcagttgcatgatgagcggtagcggcacgccctgttggtagaggtccatggcgcgggtccggcggatcaggtggcagtggacgcgttcgggcatggacgggcacgtcccgcggcgtgctctggccgccgcggttttgaggatctcgtcgatccggtccacggagagcggctggatggcgccgttcctcgtcgagtggaacaacggcctgtcgccgtcgcgcatggacggtccgggatggaattcctcgaggtaggcggccaggtgggttcgtgtcctttctcccaggggcacgacccggctcttgccgcgtttgccggtgagcgtgaccctggccggcttatccatacccacgtccgcgatggtcagtgcggcgagttcgccgatcctggcggcggtgtcgtacatgaggatcaggagcatgcggttcctgcgcgatttggcgtcgccggtgccccatgcggtcagcaacgctttggtgtgctcctccccgaggtggtcgacgggtttgcgcgcgggtggtttgacacgtatgccggccgcgtcgttgcccagcgcggtcaatgccgggtgttcgaggcccgcgtggtcgaggaacacgcgcatcgtcgtcatcctcagcatgatggtgcggtccgagtacccgcgctcggtccgcatccattcgacccaccggcccaggcgcgcccggtcgaaatgcccgaaaccgatgtggctgcgctgcgtgccttccgtggtttcgagccatcggacgtaggattccaggccgatgcggtacgcctcgacggtcttcggcgagctgccccgcaccttgggcagccagtggtgcagccagtcgcgcgcgactcgccagaagtccggttcaccggagctggcggccgttttccttgccttgctcatggttcctccgtttccgggaccacgcgttcggcgtcggcgacgaggtccgcgtatccgtccatgaaatcggggctggcgtgcacgtagtagagggtgctgtcgatgccggcgtgtcccatgtaggccgccagatagggcagcatcgccatcacgtccacgccgtcgcgagtccaccgctcgatgttcgcgaacgcgaaccggtgccggaaatcatagggcctgggccgtttgccggcttgtggccactcgagcccggcccgcgtccagacgcggcggaacaccacgccgggcatgcccggggagaccggattgccggtggaggtgacgaagaacgcgggacggtcgtctccgaagcgttcgcgggaccgttggtcgcattccagcagttcggcggcgacctcgtcgcccacgggcagcctgcggctgcgaccggccttggaatcgaccacgtcgatggaacgggccttgtggtcgacgtgcccgacggcgagtctcctgacctctcgggtgcgcagcccgcagcaggccatgagcatgaagaacgcgcgagactgccacgcccacggcgacggagactccaacgttcccgcggcccgcaggaacagggcggcctcgcggtccgtcagcaggtacggcgtcggacgcggggatccggccttccactggtcggagagcacgtacgcgtcgggatcgtgggccagtcgcatccacctgccgaagtccctgatgtacgagaaccacgagcggcaacccccgggattcgcgtcgatcctatgggcgatccatcgctccacgacgccccgctccagacgcacggccccgtgttcgaggcaatgccggtcgaacgagcgcaggacccggacgcgggtggcgccatgcctgcccatggacgccttgaagcggatgtactcctccaattcgccggcgagcgggccgacgaatccgtgttccgtgggtctcatgacgatccgccttccggcacgggcagcacgcacgcgagcattcccccgcggtgcgtggccatgtagacgcgtgtggaatcggggtcggcgtggccaagcaccgcgctgatcgtcggcaacggcgtggccgcctccagcatcctcgtcgccgcgttgcgccgcaacagcctggaaccgccccggcgtccgagcccggcgtgccgcatgacacggctgatcgcctcgtacaccgatgaatgaccccgaagcgcgacatggggcgccttgtaccgcacgaacacacggtcgtcgtcggtggcgggcctttcgtccaacagccaggacgccagcctcgcggccagcggtcccgtcatcggcacggtcaacggattgcccgtctttcgctgcaccagacctatactcatggaatcccaatccacgtcggcgatcctcagaccgatcacatcgcatgccctcagcccgcacgtcagcgacagcagggtgatcgccgcgtccctcgacggcaccgaccgcgaggcgcacgcctccagcaagcggcggtgctcgtcgtcgggcaacgttcccgcgatcgcgtgggtcctgcgtatgccggccaggccgatcgcgtccgccaggtcatcccgcccgagccatctgaacaacgggcgcaggtccgacgcggcgtgccgcatcgacgactccgaccagcgtgaacgcagcccggccaggaaccccagcacatgcgagccatccgaaccatccaacgacacgaccccatgagattccagccacgtgaggaacaagcccgccatccgacggtaatgccccaccgtcgccgaagccagtcccgaaccggcgagatacgcctcccaacgctccatgaccacggccaaacccggaaccaccggctccgcaagcctgctcctgcgccacttgcccaggtccaccgaaccggaccgcagatacgagtcgcacaaacgcgccagcctgccgtaatcgaaccaccgctgcctgctgaaaccgcccgtccgctcactgaaggtcgacgcggcgaaccccgcgcccaacccacgcgtgtacaccgcatccgggcctccggcgtaccgttccaacgccctgatggacttgcggtactggcctatggtggattccatataaccggccccgtaaagcgcgcggaccacctcgcccgcgacatggccaaccgtcgtctcacccatggcaaactccttcgttcgaatcaaatgggacaagacgaacataacccggaacgttaagccgggaaaccacatgggacacggccagccaccaagaccccgaaccgttccccggcttaacaacaaacccggcttaatcgctgttaaaccgatgtcggtttaattccgaccgcggctgccactaccggtgggacgaatggatccgcatctgcgaggagcacgggctgatccggtcgatgagcgccaagggatgcagcccggacaacgcggccgccgaggggttcttcggcaggctcaagaacgagttattctacgggcgggactggaggggcgtgggctacgaggagttccgcgaacgcctggccgcctacctgacccactacaatgaaaccaggatcaagaagtcactggactggatgagccccgtgcaataccgcagaagtcttggactggccgcctgaccgtccaaaaaaacatccgcaccccctccgtgcgatcatggacgatgcgctccgcctgcgccatcgcatgattccgtacctccacaccatgaactggcgcgcatcccggacaggccttcccctggtggagcccatgtattggggatcgcccgacatcgacgccgcataccacgttcccaacgaatacatgttcggcaccgaactgctggccgcgcccatcacggaaccgatggataaatcctcccgacggggcaaggccgacgtatggctgccgcagggcgactggttcgacttcttcaccgggcgccggtatagcgcgtcttcgcccaacggacggcgcatgaccgtctggcgtccgctcgacggaattcccgtgttcgcgaaggccggcggcatcgtgccggtgcagcccctgtccgagggggattccatcaactccgtcgacaacccgcagcatctggagatcatcgtcttccccggagcggacggcgacttcacgctgatggaggattcgggacattactctcggcagatcaccccggcgaccaccgcgatcacctatcgatggcgcaaggacggcgccacatccgcactcacggtatcgccagcccagggagacgttcacgctctgccggcccggagaacatgggatttcctgttccgaggcattaccgacagcgacatatccgtacaggccgacggcgcatccgtcgattcggatcgccggtatgatgccgaaaccctcacattgcaggtaacggtcgccgacgtatccacccgcagcgagatacgtgtcaccatcggcgacacgacgatggcccccgatccccgcatggaagacgtcttcgacatccttcggcatgccgaaatgcgatatctgaccaaggaacaggcttatgccgccatagcggagaacggcatcgacgcattggccacgatggattcactcgagcacgtcagcgggccggacatggaagattgctccgattcgcatatgccgagcgccgtccgtcaagcgctgacggaggtgctgctccgatcctagcccgcatgtcgcctctcccggaatacgccacgggagaggcgacagcagcccgtcacagacccatgtccaggcgaacgccgggccgtcaacacgtcgaggcacgacgcaccagatcgtaggaggtcacatacgtgcggaacggatccgccgacccctcgatgcgcgcgatcagcatatccacggcatgtcgcgcgtaatcatccacatgcgggtcgatcgtcgtcaatccgggcatgcagtactcggcatccggcacgttgtcgaacccaatgacctgcatatcctgcggcacgcgcacgccgcgccgctgcagctcatgaatcaccccgatggcgagcgcgtcgttcaggcacatgaccgcatccggacgcggcgcatccggatcgtccaacagccccgccaccgcatcgcggccgccggactgcacccaatccgcgttacagaccagccgccaatcgacctgcaggccacgctcctcatgggccaacacatagccgcgggtacgcatcgtgctggtggtttcgggccgcgactcgcggtcggcatccgggcatgcgttctccgcggtgccgccgatcaacgcgatcctacggcatcccgaatccagcagcgcccccaccgcggtgcgtacggcctccacgttcggcatcgtgacccaatcggccagtccctgcgtatcgtaatcgcccacaatcaccaacggatacggctggtgcagtatcgtgcgatccgtgatcggcgagcccatgaagaaaatccagccgtccgcggccagcttcttcgtctccgggatcgcctgcgccaagccgccggcgctgttgtaggtatcggtgatcaccgcgtacccgcgggaacgtgccgccgccacgatgctgtcggcgagatagggcatgaacggctggcagaaatcggtgatggccagtccgatgagcttcgtgccgccggttttcatggcgcgggcggacacgttaacgcggtatccgaggcgttcgatggcatcctggacacgctggcgcgtctccgggcgcatactgccggtgttgttcagcacattcgacaccgttttgatggagacgcccgtctcgcgcgccacgtcggtgatggtcacccgtttcgccacagcacccctctcgtcgcaccatcgggcatgttccgcacggttcaggcggaacgcccgtctgattccagcataacgcgttttccccggccggtccggtcccttccgcccggcccgggaagcaagggccgtgcgatccgtccttctccggaacggaccgcgcggcccatcgcgtcacttgatgtgcagggcggtccaactcaccggcggtagggagacgcggaccacgccggactcggcatcgtacatggccgacccgttggcgtgcggggtcacacggttctggtcgtagagcgtattcgcagcgaacagatcgtcgtcgtgcagcgtctgcgcctcgacggatgccggctgcgcgccgtcctgcagcctgatctcgaactcggcggtcgcctcgagcgaacggttcaccgcaaacacggcgagcgagccgtcggcgcagcgcacggccacggcgttcacgccgtcgacctcgccatagcgcggcgtatccacggtgccggcggacagcttcggctccagcacggtgccgcccttggccaggcgcgcggtcacggagaacgggtggaacgtggtctggcgccaggccgggccgcccggctccgtcatgatcggggcgatgacattgaccagctgcgccaggctggcggcgcgcacgcggtcggcgttcttgagcagcgtgatcatcagatcgccgaacaccacggcgtcggcggcggtgtagatgtcctccagcagacgcggggccaccggccagttgccgatgccctcgggggtcttgctcggctcctcaccctggtaccagacattccattcatcgaacgagatgtacacgtcgtgcgcgctcttcagatgggccttggtggcgtcgatggtggcggccacgtccttgatgaagccgtccatatccacgccggaggccaggaagctggccatgtcgcgcgtgccgtcctccttgaagaacggctggtagtaggcgtggcaggagacgaagttcacgttctcgtaggtcttctcaagaacggtctgctcccacttgccgaaggtcggcatgccatgggcggaggagccgcacaccaccagttccacatccggatcgatctggcgcatgccggcggccacggaggcggcgagcatgccgtagtcctcggcggacttgtggccgagctgccacgggccgtccatctcgttgcccaggcaccacatgcggatatcgaacggcttgtcggcgccgttggcgcggcgacgttccgacagctcggtgccgccgggcacgttcgcgtactccagcaggtccagggcctcctgcaggccgcgcgtgcccaggttgacggcctccatcagctcgttgccgccggtggcctcaagccattcggccatctcgtgcaggccgaattcgttggtttcggtggaatgccaggccagatcgagtcgacggggacgttcctgcttggggccgatgccgtcctcccagcggtagccggacacgaagttgccgcccgggtagcggatggtggtggcgccgagttccttgaccaggtcgatgacgtccttgcggaagccgtgctcgtcggcggtcgggtggtcgggctcgtagatgccggtgtacacgcaacggccaaggtgctcgacgaacgaaccgaacagacgattgttgaccggagcgacctcaaaatcgtcatcgacgacgagacgtgcggtcagatggtcctgctggggcatgggattcctttctacatatctgcatgcactctgcatacgtgacacgtatccatacaacgatgtaccgcggaggcgcgggcgaccggggacatccgtgtggcagccaccagtgtagtacaaccttgtactgactgccggaaggcgtgtcgcagagacggctgagaccttttggcgcaccactgcagcaaaaaagatcccaagaagtcgaattacagtcccatccgacgcatagccaccgtgaacatacggcaaaaggcatcaaccacgtcacccgtccacccgctacattcacaagcagtaccgcccactctgcatcattcgcatatgcaaaggccgcgaaccgtacgatgacggttcgcggccccctgacatgccattaggccacccggctcgcaccggctgttcggcctgccggctcagccctcgcgcttgggcgcctggctggccacgcgggtcaggcgcggcggtcggcgcgtggacacgaacagcggctgcacctcgaccagcgggttgtacggcgccaggccgaaccacttgaccggggaaccggccacgcggcggatcgcgtacttgatctgcagcgagagggcgccacggccggagaccttcgactcgggcatcagcgccttgtggatcaccacgtagcggatggtgccgatgccgggatcggcgtcaagcttcgggtagatcgactgctggttcggcagctcgccggtcttctccagatcgtgcatgatctgatgcaggtaggccgggatggactgcgagaccttgaagccgaggcggatgcgcacacggaacaggtagtcggtaccgaagctctcgaccgaatactcacgggtgaacggctcgtcggtggtctcgacggccaccgcccaccatgcgcgggcgcgcttggggtggtcggcgaagatcgagaagaagatgtccgtatcgagacgcttcaggtccggatcgctggtcaggtagacgatgttgtccgcgaaccggtggatgcggctatcgccgtgcagcttgtccagcgcggggaggaagtccttcggcatcatgtgccgacgctgcgagcgctccagcttggtgccctcgttccacgtgtacatgatcatgaggatcgccagcgtgagcagcagcgtgaaccagccgccgtgcaggaacttggccatcgaggcggcgaagaacaggacctggatcgccaggaacacgatggtgaacacaacggcgccgaacttgttgctgcggtgccacaggtagatgcccagcaggatcgtggtggtgatcatcgtgatggtcagtgccaagccgtaggccgccgagatatgttccgaatcgcggaacagcagcagcacggccagcgtggccacgcacagcaccacgttgacgaccggaatgtacagctggccgcgggtacgggcagggtaacagacctgcagatgcggcatccagttgaggccggtggcctcggagaccatggtgaacgcgcccgtaatcagcgcctgggaggcgatgatgccggcggtgaccgacagcacgacggccacatagcgcacgttcggatccatcatctggaagaacgggttgatcccctcggcgtcggccagttcggggttgttctggttgtgcagcatccacgcgccctggccgaagtagttgagcaccagcgccaccttgatgaacggccaggtgaagtagatgttgccgcggcccacgtggcccatatccgagtacagcgcctcggcgccggtggtcgaaaggaacacggtgcccatcagcgccagaccggtggcgttattcggactgaacaggaacttgatgccgtagtacgggttgagtgcggcgagcacggaccagtcgttgccgatggctaccacgccgacgatcgccaggaacgcgaaccagaccatcaccaccgagccgaagaccttgccgatcgattcggtgccgcgcgactgcacggcgaacaggatcacgatgatcaccgcggtgatcatcatcgtcagatccttgttctcggtgaacagatgctccaacgccggcagcgtcttcaggccttcgacggcggacgagatcgacacggccggcgtcagcaccgagtccgccaggaaggccgcgccgccgagcatggccggtatgacgagccatgcgccgtatttgcgaatcaacgagtacagagcaaagatgattctgcagaaacggacatccaaacatcccaattcacatcacacatgaccgattctccagaatcggacacacagaacacatttttcggaactcagacgtccgattcggcagaatcggacacatgtgcacaagtcgaatgatgagcacgactatcgacgggcgttcgccggttgtggacgccgctgaaatcgatgcgatccacaccgggcacacgcatgaagacgcacagtatcaacgcgtggtatcgcctggcaccagtgtcatgggaataagcacgttcggctcgaacggcttggggatgttcttgcgtgaagcgttagccgcggccacttcctcattggcaatcgcctgcacgatatggtcggccgccgactgtgcgatcgccgagaaatcctgcgcgaccgcggtcagcttcatgccggccaaatcagtcaaatacgtaccatcgtaggcaacgatctgcagctcgtcaggaatggaaattccacggcccaacgcttcgcgcacgcagaacgatgcaccaatatcggaactgaccacggcatcgacgccgtcggtcgtcaccttgtcgagcgcattgctgaccgcacgatgatagccggcaaaatccatcacttcgccagcttcaacatactcgtatttcacgcctgcggaggtcaattcctgttccaacgtgaggtagtagcgcaccgtcgggaacgtggtctttcccaaatcgaacggtccttcctcgacttctccgcgcgcagccaaatcgaagaattgatctcgcggaccgccaatcatcaccacatgtttggcaccattgcggatcagcatctgcgcaatcaatcgcccaccctgctcgtggtcggatccgattgacgaaataccgtctccaagcacacggtcgaacgcgacgatcgggcgatgaatcgacgtccaataatcgccgggatgcgaagtgtgcgcacacatgacgatgccgtccatcatgtgccgacgcaacatgtcgacatactggatttcgccatccgcctcatctgcggtagagcacagcatagtgcgtaatccttgcgcggcgagtgcatgctgcagatgtgcggtaaacgtcgcaaagaacgggtggcggatggtaggcacgatgacgccgaccagattcgtgcaatcatgatacagattgcgggcaagctcgttcggcacataattgagggcttgcatggctttgcgcacacgttcgcgcatgtcatcagacacgtacccgttgccgttcaccaccagcgagacggtgctcagagacaccccggccttcttcgccacatcgcgcatgccgaccatgatcgcaccttccccgttatcactgttctatcgttgtatgctcacgtgcttaccacgaaatattacattcatttacattctctcgaacctgttcgacagtccggcaacgaaatacagcttcttagtgtcgactcctgcggaggcgaaggccttcagcagcggcttggtctggtcgaatgcaatcaccagcgttgcatccggactggcggccttgatggcggtggcgctcagatttctttcacgttactcagcgaccgtccgtgtaacgtgaaaattacgccggattggcaagcagcgcaatgccgaaaccggcggccacgcaaatgagaggcaccgcgacggttgctattccatagcccagagccagcgtaaaacgacgctggcgaatcaatgaaaccacttcgttgagcgccgtggagaatgttgagaaaccaccgagaaatccgacaacgaacatcatgaccgtgtccatatccaccgattgcgaatagtaggacatcatggcgatgcccgcgcatagcgaggcgacgccgttgatgacgagcgtggatagcgggaagttgcggttcgttcttcgattctcgcggttccagcctcgttgaattgacacgtcgagcacgtaacgggccatggctcccagaccgccgaacagacagatcatccacatcatcagcgcacctccccggtagtcgggtcggcgacaagcgaaatctccgcagtgatcggtttgggctcgaagctgggtggaagcgggttggccggctgctggattggctgcgactgctgctggggctgctggattggttgcgactgctgaatctcgggcagctgccccaagtctggagtatccggctcgcgcagcaacggatgcgccggctgcgtcagctgaggaacggccagcggaggaatctgcggaacgcggcctgtctgcataggctggctggcggtcggcggcacggttggtgtttcgactcgcgggacctgtcccgtctgtgcaatctgctgggccgtctgcgcggcctgctgcgccgcctgcgcggcttccattgcggcctgcgcggcagaacgcgccacgtcggccactttcacatggcgtacgccctgcgtgtccgattcggcagaatcggaaacggaaacagctgaaaacgcaccccgaacccgctttcgagtactccgtgacagcagtgcctgcatcagaaccacgccggcggcggcagtgagcaaaccgcctgcaaaatttcccgcaagatagccaagcgcactggcgatatgccgctcgtgcagaccttccatcgtttccagcatcacgccggacatcgtcgaaagcccgccgagcaagccgagcccaacgccacggctgacaacctgccgcacccggcgacgcagccacgaagcggtcgccatgaattcggtcagcatcgcgaacaggaagcaggcgaccatattcgacacaaacgtgcccacaacgaacggcgtcccgctgaccgacggcagaagcatatccaacgcatgccgacagccgactccaacaaatccaccgacgaacaccacaacatacatcagtccgtcggcgagcggattgaaccgcgcctgcatacgtttcatcggtgccaggggaatcgtaggcggattcatggtgttagcggcgggcgcggttgcaccagcatgcgtcacctcaacagtgtcgattgcctgcgtgatgggatgtgagtcctcacccgcagtcaccacgtctcccggcgattgttcttgcgattccattgcgctccccctgtactggccttccgcggacagcgttgttccgcccataggccgtgcaacaacgagctgggccgcggttgccgccttcctaacgcatatgagtttacacggagcgccaacgtatgcaccctggatgtccgattccgcagattcggacatccagagtccagccgaattcagccaggctcagtcaagccgggcatcacacagccgccgcatcgcaggtcgcacctcgcgctcctcctcgccactgaacagcaccaccagatagtcgccggcacgcagccgtgtatcgccgcgcggcacgatctcgctttcgccgcgacgcaggccgatgatcaggcacccagacggccaacgcacgtcacgcacccgcttgccgtccgcaatcgcccccatttccaatggcagttccataatgccgctgcccacatggcttgcgatcgccatctgcatgccttgcgcgcgcacgtaccgctccagcaactccccataaatcggtttggtgcgcagcaaatcggacaccaacagcgcgatgaaagcgacggccgcgaccggcagcatatgcgtcaacgttccagacatctccacagccaacagaatcgacgtgatcggcgttttcacggacgcggcgagcgtgcccgtcatcacgcacaccgcaaacaccgccactgcgtcggatggcagatcaccgaatcgatgcaacacttcaccgcagatgccgccggccaacgaaccgaccgcaagaatcggcatgaaaataccgccaggcgcgcctgagccgaaactcgtagatgtgaacagcatcttcgccacgaacagcagacacagcattcccaagccgacgcgcgcatgttcggcggtatcaatcagattcgagccgccgccgagcacatcgggcaaccagatgccgacaggcaacgcaatcgcaatcgcaatcatcgggcggctccatgccggcagtttgccgtacagcgtctggaagccaagcaacgagcggttcatcagcgaaccaaccaaaccggccaccaatcccaacggaatcagccacacatactcttccaacgacagctgaccgatatcaccgaaatccaaaaccggacgcagaccgaaacagtattttgagacgaaatcggcggtcagcgatgcggcggtggcgcccatcagaatcgcaggggaaaaactccgatgcaccccttccaaagcgaacatcatgccggacagcggcgcgctgaacgcggcggacaagccggccgcggcaccggcggtgaccagataatgctcctgcatgtcctcacggcggcggccgcgcaaacggtgggatacacactgcgcgcccgacgcaccaatctgaatggacggcccctcacggccgagcgacagaccaaacaacgcgcccaacagtccaccgacgaaacggactggcagaatcgtctgccaacgcatcttcaagccgcatatcaccacgccgttggtctgcgggatgccgctgccaccagccatcggctccttgccgaccatccacgcgattgccagcgcggccgccaccgcggcaaccgcccacggcgcaatcagccacggggtctcgcgaatccgcgcatatatccaacgggacgcatccgtgccgtattcgatgccgagacggtatacgacaaccagcaatcctgaaaccagaccaatgactatgccggccgccgccatcttccacttcaagtggtcgaatcgcggaatcagccggcggatatcatgtgccgcgtcgttaccagtcaagccgggaaattcgttgcagacggtcagtcgaccagcgaattgatctggatgacatgatcgcgctgcggaccggtgccgatcgcggagatacggcagccgctcagctcttccaaacgcttgacgtaggcctggcaggtggcaggcagctcgtcgaaggagtggcagttggagatgtcttcatcccagccgggcatggtctcgtaaatcggcttggctgcggcgaaagcggcctgatcagtcggcatatcgtcgtgacgttcgccgtccacgtcgtaagccacgcagatcggaatctccttcaggccggcgagcacgtcgagcttggtgagcacgatgtcggtcaggccgttgacctgggaggcgtaccggttgacgactgcatcgaaccagccacagcgacgcgggcggccggtggtcacgccgaattcgtggccctgctgacgcagccattcgccggactcgtccagcagttcggtggggaatgggccttcgcccacgcgagtgacgtaggccttggagacgccgactacgcgggtgatcctggtggggcccacgccggtgccggtgcaggcgccgccggcggtcgggttggaagaggtgacgaacgggtaggtgccgtggtccacgtcaagcatggtggcctgagcgccttcgaacagtacggtcttgccttcgtcaagcgccttgttgagaatcaggccggtgttggccacgtacggcttgaggcgttcgccgagcttcagcagctcctcggtggtctggtccacgtcaatcggacgacggttgtagagcttgaccagcatctggttcttctggtgtaggctggcctccaccttgtcgtgcagatggtcggcgttgaacaggtcatgcacgcggatgccgacacggttgatcttgtccgcgtaggccgggccgatgccacggccggtggtgccgatcttgtgcttgccaaggaagcgttcggtcaccttgtcgagtgtgcggtggtagggcgcgatgatgtgtgcggcctcgctcaccttgaggtgggagcaatcgatgccgcgggattccaggccgtcaatctcctcgaagagcacttccgggtccacgaccacgccgttgccgatcaccggggtcaggttcgggttgataataccggaaggcagcaggtgcagggcgtacgactcatcgccgaccaccacgctatggcccgcgttgttgccgccgttgaagcgcgcgacgtaatcgaccttggtgccgatcaaatcggtagccttgcctttaccctcgtcgccccactgagcaccaataagaacaattccaggcatgatgcacctccgcattcgcacgattccgccggaaacagactaccgtacaccctctaccctgcgaagtttcgtctcacgcagggcgaggctggaggtgcgacaacccggaatgggtgacgaatttctactcgtacgaggcgatgctgtgaccaatcgcacagcgcacaggttgaagaacggagcctagagggcatgcctcgcgcgataatgaagccatgacgatcgcaacaccggaacgctatgccgaaatgctcgaggccgcccgccgaggcggttacgcctatccagccatcaacgtaaccagctcacagacactgaatgctgcgttgaagggcttcgcagacgccgagtccgacggcatcatccagatttccgtgggaggcgcggcctacgtctccggcaggggggtcaatgatcgcgttaccggctcgctggcgctggcggctttcgcacatgaagtggctgcgaaatacccgaacatcaccatcgctctgcacaccgatcactgcgccaagcagtatctggatgagtgggcgcgtcctctgctcgcgcatgaggccgatcaggtggcacgaggccaggagcctacattccagtcgcatatgtgggatggctccaccgtgccgctcaaggaaaatctggacatcgccgaggaactgctcgacaagtcgcagaaggcgcacaccgtgctcgaaatcgaaatcggcgcggtcggcggtgaggaagacggtcactccgccgaaatcaatgaaaagctgtattccactccggaagatggcctcgaagtcgcccgccgactgggtttgggcgaacgtggccggtacatggccgctttcacattcggcaatgtgcatggtgcctacaagcccggcgtggtcaagctgcgtccgtcgctactcggcgacattcaggcgcgtgtggcgcgcgcggtggccgaaggcgagttgcctagcgcggccggcatagtcgatttccccaacggcaagccgtttgagctggtgttccacggcggctccggttcacgcccggaagaaatcgccgaagctgtaagctacggcgtgatcaagatgaacatcgacaccgatacccagtacgccttcacccgtccaatcgccgaccacgtgttcgagaactacgacaaggtgctgaagatcgacggcgaagtgggcgagaagaagttctacgatccgcgttcttggggccgtaaggctgaggattccatgtccgcccgcgtggtcgaggcttgccggcagctgggttccgcgggcaaagcgctcaaatagcgcgtagttttgcaatcgtgcgcgacactttcccggaaataatgaaaatcattgaaaatcaatggagcggacaacgggagtcgaacccgcctctaaagcttgggaagctttcattctaccgatgaactatgtccgcatgccttacggctgctgcacctcacgtgacgagcatgctcagccaaacgaggcacgaatagttatcctagcacgtcacctgccgacgcgcgtggagtaggtgggcggagcgatcggcgtgccgttcatttcgttggccatctgcatgagacgcgctatgcgctcatcggtcggcgggtgcgtggagaacaagcgcgagaaaccgaccgcggagaacgggttggcgatcatcattgcggagacggactgggtgccggcggttttgcgcatcggcgtggtctgcgcgccgtaggaaatcttgttcagtgcggaagccagggcctcgggatcgccggtaagcaggctgccgtcttcatcggcgtcgtactcgcgggtgcgggagatggccatctggatcaaagacgcggcgatcggcgcgagaatcacgctcagcaatgcgccgatcaggccgaggccaccggaactgtcgcggtcgtctcgcgaaccgccgccgaaatacatcagcgaatagcctaggtaggagatgacggtggccatggcagaggcgatggcggaagtcaggatgtcgtggttgtacacgtgcataagttcgtggcccagcacaccacgcagttcacgggcgttgagaatctgcaggatgccttgggtacagcagacggccgcgtgccgttcgttgcgcccggtggcgaaggcgttcgggctcatggtgggggcgatgtagatgcgaggcatcggcttgccggccttggcgctcagttcacgcacaatctggtagatctccggggcttcctgctcgctgacttcccgcgcgcccatggaggcgatggcgagtttgtcggagaaccagtaggtgccgaacgtggtaatcaggccgatgacgatatagatgctcagggtttgccgactgccgcccgtggcccaccaaatcagcatgatgatggcccacatcagggcaaacagcagcgttgttttcaggccgttgaaatggccgtgcacccgtactttggcatccataatgcacacactaaaatcgcaggctgaatgattgctggatatgcgccacgcgcaatgtcccatattcgcccggcccgtccggccccgagcccggccgcgtccgcacggggcgcggccgggtggacgaatgccggacgaatgccggacgaatgccggacgggcgtgggcgggccgtcaggcgtgggcgagctcgcgcatctggtcgggctcgatgaccttcttgtgctcgcggccttccttggcaccctcggcgcgctcgaaagcgtcgaccttcttccagccggcgaagtcgatcgggcgaatgccgcgctcggccagcagtcggtcgatggattcggggtcgcggtcggctgccacacggccaccttcagcggccttggccagatcctcgagcatgttggtcacgatggcgagcgcatcggacttggtggagccgatcaggcccaccgggccgcgcttggcccaaccggtggcgtacaggcggtcgcgcactttgccgccgtcggcctcggtggtgatgcggccgtcgccgttggcgttggccaggtgggcgccgtgctcgtcgtaggtgataccgggagcttcggcgggcttgtagccgatggcgtggtagacggcctcaaccgggtagtcggtgaactcgccggtgcggtgcatcttgccgtcggcaccggtttcggtgcgctccacgcggatggccttgaccttgccgtcctcgccgagaatctcggtgggggcggagttgaagtgcacgtagtactttcggtcggccgggttgccttcgaagtcgacgtcgccgtcgtcttccatgtcttcggccatctcgcggatggcgaacagctcctcgaccatctggcgggtgagcttgtccttgccggccacctcgatggtctcgtcgtccagatcgaagtcgtcctcgttgatgatgagctgcacgccgggcagcttctccatctcgcgcagttcctgcacgctgaacttggcctgggccacgccacggcggatgaacaggtggagcaccttggccttgttctggccgatgccctcgtacacgttgtccggaatgtcggtcttgaccttgaggtcgtcggcgttgcgcatgagttcgcgggccacgtccatggccacgttgccgccgccgattacggcgacgttctcggccgtaagcggccattcgcgggcaccggtggggtagccgtcataccattcgacgaacttggcggcgccgtacacgccttcaaggtcggcaccgggcaggttcagcggcttgtccttgaccgcgccggtggcgaacagcacggcgtcgtaacgggccaacaggtcgtcaagagtcacgtccttgccgaattccacgtcgcagtagaggtggatgttcgggttgtcgagcgtcttctcaagcgcggaggcgatgaacttgatggacgggtggtccggggccacaccgtaacgcaccaggccgaacggcaccggcagcttctcgaacaggtcgatgcgcgcttcggtgccgaggccgagctcttcgcccagcttcttgagctggcgcaggaagatatcggatgagtagacgccggccggaccagcgccaattacagcaatgcggagttcagtattcacagattcagtcacgcgctctagcctaacgcaaagccttccgttgcaacagagggcgagtggtgggaattctgtgtattaggccatagtttgtgcgtttgggaaacctacgagcactgctaatgtcagattatgggtttccctattggtcaagttattgccgttctcattccaagaagcatgcaaggcggatcaggcccttactccggatacgtttatgctgcaaggcggttatccacgcatttatgacacgagaatgccgctcaatctgttcttctcgaactacatcgacacttatatcgaacgtgatgtttccgaatatcttgatgtacgcaatttggctgaattccgccgattcttgactctttgcgcactcagttccggagcactcataaactacaccaacatcgccaatgaacttggtgtaagtccgcgaaccgtaaaggcatggatgtcgattctggaatcaagttacatcgcattccatctcatgccgttctacacgaacgcacgcaaacaggtggtcaaaacgccgaaactctatttttatgacactggcttgctgtgtcatctcttgggcattcggacggtcgaagcactggttgcgcatcccaagttcggcgatatatttgaaaacctcatcattgcggaaaccatgaaacagcatttgaacgccaatcaggagccacaattattcttctaccgcgatgccagcaaggtcgaggtggatttgttggatttcaccgatcctaacaaccgtatgctcatagaaatcaaatccggacaaacctatcatgaccggttcgcccgccatctcactttaattggcaatgttctcggtataccgtgtgagcaacagtacgtaaccagtcgggttgagcatagttatgtctcacaaggaatccgcgtcacctccacccctcgattggctagaaggccgacggtaaagagccgccgcagagcagtaggaattctgtgcaatcagtgaatcccttgaggcattaaagacgtcacctccaacggctctttacgacctcgattgcattcattaggtcatttcttcgtccattaggtcggagggtgctgaagccatcccttggaacggcggggtttcaagggccgctccgaccaaggaccgacctaataaacgtcaaatcgacctaatgaataactccgatgctattgctgctttcgtgggtgggatttccgtttccgccacgtcaccaaccgtatcgccccgattatgtttcgatgcggtggactcgacatacgaccatcccggtcagtcaactgacctacaaaaacagcagaagcctcatattcttaatcagtcccgatcaattagggcagtgagggcccagaggatgctcaccacgtcgatggcctcctggaggaaggcaccgacgacgaccgggataaggttgaacgcggcggcaatcatgccgatggtggcaagcacaaggcccgcgattacggcttgaagcatcacgcgcttggtgcggcgtgcaatggcgatggcgcgcggcacggcggcgatattgtcattcataatgaccacctgagcgctttcggaagcggcggtggacgtgccatcggtcatggccacgccgatatcggcaacagcgagcaccggggcatcattcacaccgtcaccaaccatcatcgtgacggttttgccggctcctgtagcggccctgactgcggctaccttatcctccgggaacagttcggcgtgaacctcgtcaatgccgacttcgctggcaatgatattggcggaagcccgcttgtcaccggtaagcatggcgagctcggtgacgcccaactcatgcagtttggcgagcactgccttggcgttggcacgcggcacatcgcgcagcacgatgcgcgcgatcagccggccgtcaacggacacgtaggacgccatctcatccggctgcagcaggccaaagcgagtgcgcaggtcatctttttgctgagctccccctcttagggggagctggccgcttcgcgggctgaggggggcagcctcgccgaccgccaggaatccatcctccccagcagccgcgaaagacagccggccaacgcgcaccgcgtgtccgttcacctcgccggaaacgcccttgccggcgtcttcattgatgttcttgacgaccggatactcccggccatggccaggccagctggcctccggctctgggcacaggcgctggccatcctcgaaccgctggcgcagtcgggccagcgcctccgcgccggccttggcaatgcctttggacaggatgtgcaccgagtagctttccaccgcgccggccatcatcagcacatggtcttcgttgagacgggttgcagcgccgggcaacatctcgacgcgcaccacctgcggctgcttgacggtgagcgtaccggttttgtcgaagaacacctgcgtgacgcggccaaggttttccagcacgtcctgtgctttgataagcacgccggctgcggcgaggcgtccggttccggcgatgtatgccaccggtgcggcgatgagcagcgggcagggcgtggccagcaccagcacctgggcgaatcgcgtcggtaccccggacaccgcccatgcgacgccggcaatcaccaacgaaagcacggtaaagggcacggccaagcggtcagcggtttttaccacggccgggcgcgactcctgcgcggaggccacgagctcgaggatgcgctggtactgcgaatcggcggccacctgggtggcacgcatggtcaatgcagtcgagccgttcaccgccccggacatcacacgggcgccggcgaacacttcacgcggcaccggctcaccgttgatattgctcaggtcgagcgtggccgtgccggacagcagctcgccgtcaaccggcacagtttcgcccggcaacaccatgagtacgtcgcccagctgcacctgctcgaccggcaccgtgtcgaagcggtgcgcggcggcggcagccgatgccgagcccacacgccggaagccatcggacgaatcgcccttatcggcagcaaacccacgccccacgccaggcaggttgacgacgtgcgcggtttgcggcgcggcctccatcagcgcggtcaggctgcgctcggccttggcttgagcgtattcctcaatggcctcgccggacgtgatcatcagcgtcaccgcccaacttgcccagtattcggcgacggccacggtggagaggatcgcgaccacggccagcacatcgactccaacctgcccatgacgcaaatcgtcaatcatgccgcgcacagtgtcaatcacaataaccagcaccagtgcgataaccagccactggccgaaacccggattgccgagtaccggaatcgccatcgcattgccccacggacgccaatcgcctagtaaagccaacggaattgcggcgatgacgacgaccggaagcatcggcacaagcttgcagatgtcgagaattttggtgaagaatctgatgagtctgctcatcattgctccttacgctcgtatacggagtcgattgcggtacggcaagcgtggcccgcgcaatcggcgctacggtcacgccttgttaacccaccggcggctttgcctggggcttcgctttgctcggctcccgcgcaaccttccgatacacggcgtaaagaaatgtattcagttttgtattgaattatgcgctgtgttcaggacgtcgcccgaactcagtgcttggcctaccctatcaacgagcgttgcgcgacatgccggatatcgaaactgcgttggcggcatgggcgcggggcacaatcgcgcatacgaaaggcccgtggcaggagtttgctcactgtcacgggcctttgcttgtccgacacggtgttcagcggttaccgctcaacaccgtgtgacgttgtcgagtcggctttaccacaggccgaacgggtcggagaagccgccgccgtcaccggtgccgccatcgctgttgccattgccattaccgtaaccgttctggccattgccgttctggttgttctggttattctggctgttgccgttggaatcggagccggacgaaccgttcaccgacgactcctcctgatcgagcgtcacgtccacattcatggtcttgccgtcgcgcacgatggtcagcgtcaccttgtctcccaaagccgcggcacgaacgtaaccaagcagcgagtagttgttgttcacggcgttgccgttgaaggccacgatggtgtcgccctccttaaggccggccttgtcggccgggccgccggagacgaccgcgctgccggtggcgctggacttggtgatggtcgcgccgccgcgggtcacgccgtcggcttcaaccgtgtcggacttgatgaccacgccgagggcaacgtgcttgaccttgccgtccttgatgatttcgtcggccacacgcttgacgaggttggacgggatggcgaagccgatgccgatggagccggcggagtcggaggaggtggcggtggaggcgatcgaggagttgatgccgatcacctggccggccgcgttgaaggtcgggccgccggagttgccggggttgatggccgcgtcgatctggacggcgttggtgacgatctcgttgttgttgtcgtcggtcacggtcaccgggcggttcagggcggagacgataccggtggtggcggtgtcgtcgtagccgagcgggttgccgatggccatcacgttctcgccgacggcgagcttgtcggaatcggcgaattccacggccttgaggtcgctcggcgggttgtcgagcttgatgaccgcaagatcggtggtggtgtcggtgccgacgagcgtggcggaatacatgttgccgttggcaagcgtcacctgaatctgctgggcgccggagatcacgtggttgttggtgatgatgtggccttcggtgtcgatgatggcgccggagcccttggcggtgccgttgctcaacgcggtctggatggagaccacggagccggagacatcgctggcgacggtctgccagtcgggggcttcgccgctcttggcggtggcggacccggagccggacttattcgagctgacgttggacagcgaattgctggtcggcaaggtgatcaggccgctggtgagggcaccgtaaccgaggcccaggcagagggccgcagccagaacggcggcgaccacggcgatgaggatgttgctcgccgtcttggacatgccctgcttggcggggccgggctgaccgggctgtcccggctgggtcggaccttgaccgttcggcgtaccagtaccgggagtgccgaaaccgaacagaccgccctgctggggctgctggccattctggccattctgaccggactggctggcaaacgggttgccgttgttctgctgcggctgcgtgggcggattgaacggattgccgttgccctgcggctgcgggttattggtgtagtagggattgcggttgccctgctggccctgtagggtttgctgtgcaggctgaccgaacgggaattgctgcgtgggctgggcattgctgccggcctggccgccctgctggccctgtgcctgagtcggggtcggaccataagcgccatattccggggccggacgatacagcggagttgtggccgaggtctggcctgcggctggtgctgccggagaagccggcgaggaggagaccaccgtgctctcgcccttggcggaggcgtagtccgggatgggctcggtggcggcagtgtcggtagcggcttgcgtaggctgctgatcggcagcgagggcggccgaggaaaccggggcttgctgctcgctggaatcgctggcgttgccggcatcaaccgagtcgccacccacaaacgggttcttcggctcggcgttgccggtatcggcagtactattggggttttcgttattccgcggggtctggtcgacgccctgcgggttaaattcgtcagccattgctgctccttttcctaaattcctatcacgtctgttcggcggctattcgggcacttgcccattgccacttctcgtgtgctacctcagtagtaaaggcagtcaatctggaggttttctgaacgttgattgaaagtctatgcgtaatcatcgcagagtcttatgggcatctcggcttcgaggggctgatttcctgtttcgggaacatctacttgcacttcaaggggctgttcgcgcggtcaattccgagtatcaagggccctcatttaacgccattccgccatttttgcagccggcctacttgaccgggagccccttgaagcggaagtagacgttcgggagcggcgaaatccgcccctcgaaaccgagttcttcacaatttccggcccttttctggcccttctgcctaaagtgaacatatgacgatcagccttcttgaacatccgttgggcgcacagcccggacagcccggcgaccgcagcgccttccatttcgaaacgatcacccgcctgccatccacggccagcgggcttgggcgagacggtgcccgatacggccgcaccggcatcattcacacgccccacggcgatattcgcacgcctgccttcgtgccggtgggcacgcaagccgcgatgaaggccgtgctgcccgagcagatgaaggatctaggcgcacagtgcctgctggccaacgccttccacctgttcgagcgcccgggcgaggacgtgctggacgcggccggcggcttggcgcgtttcatgaactgggatgggcccacgttcaccgattctggcggtttccaagtgatgtcgctgggcgtcggcttcaagaagacgctggcaatggacgtgaccggcatgaagtcggacgacatcatcgccaagggcaaggagcgcatggcctgggtggatgaggacggcgtgacgttcaagtcgcctttgaatggtgacgcacatcgtttctccgctgagatttcgatgggcatccagcacaaaatcggcgcggacatcatgttcgcgttcgatgaactcaccacgctgatgaacacccgctcctaccaggaggattcggtggagcgcacgttccgctgggcccgtcgctgcgtggacgagcaccagcggctgacggcggaacgcctgggcaggccgtatcaggcgctgtatggcgtggtgcagggcgcgaattacgaggatctgcgccggcgcgcggcttcgcagatcgcgtcgctggacttcgacggcgtgggcattggcggcgcgatcgagaaacgcatcatcggcgacacttgcgcctggatctgcgacgcgatgccggagagccggccgcgccatgtgctgggcatcgcctccgtggacgatatcttcgcgtgcgtggagaacggcggcgacaccttcgactgcgtggcccccgcgcgctgcgcccgcaacggcgcgatctacacgcgcgccggccggtacaacatcaagcgcgcccagcacaagttcgatttcgggccgctggaggaagggtgcgactgctacacttgccagcattattcgcgcgcgtacgtcgaccacctgctgcgcgcccgcgagttcaacgggtttacgttggccacgatccataacgagcatttcttcgtgaagctgctggacgacatccgcgcctcgatcgacggcggatactttgatgagttccgcgacgaagcgttggcccacttctacggcaacggcgagcgccggccagggttgtgagtttttctccttcgttgcggcttgtgccgaacttctctctgctcccctcgctgaggctgagacgttaagcaaacagcccagtgggctgtttgtagtcgaaggtgagacgatagtcgaaccagcaggttgcaggcaaggcccgtccttaattgcggacgagctgtcacgaagtgactgaggggagtgccgccaccctcaaagatcacggcgcccgcaggagacccacaagcgatatatccctgcctcccatgcgacacgccgaagattgcatgattacccagccgggtgtaagttagtcgattgtctgcgagtgtggcggaatggtagacgcgctgtcttcaggtggcagtgagtgtatgctcgtgggggttcaactccccccactcgcaccagcaactaaagggctggaatcggaaggttccagcccttttgctttgtccgggcaagcgccgtttttcaagttgcgatggccttgaggggggcttaggacttgagacttatggcccaactttcgtggcggaaaatgtcccggtacctgcatcaatcgtttgacgttcaagccaggccagaatccgctgtcccggttcgcgatttcgggcgatctttgcaaaccgggacaatttttgttgccccggtataaatgtcaatcgatttatgcgaaaaccgggacaacgtgccaattccagaatcggccttattccgccgattccgtctgccagacgatatgagttgaggaaaccggagtgtcccggttcacgaaaacaagccgaaatcgccgaccgggacagcggattctgccccggtcgacaggtcaaacgattgacatatgaaccgggacaaatacagatcagagagaagcccatgaagtagatttaactttcctcaactttccgtccgccataaactagcattacatagcatcatgaaccgagacgaaatcaacgaagcatttggagtcaccgacgaccagctcgaccgaatggccgagccgtacgaatccgacaattggcagggcggtgtcgggagcatcattcgcagcaatccgaaatcaggaaccagcacaagtcggaccccagcagacacgcataatacgagttcacagacttagcgatgcattccgcaaccgtaccaccgaataccacaccacggaagaactgtaagcattacgaaatcaaccttgattattgcgcgggcctatactaggttacggcagcgtaagttagtggccgggagagcgtcgccggccatagcgaggtgatcggtatgagcgtttccatcaacacgccatctggacgaaccatggcttccgccgcaacagttgtgtcttccacaaccgcgagtcaaaatccagcgcaagcaccagccccaccgcactggatcgcgcatcagctcagtacaggggccgcgcaatcgcgctatcgccaagccaaggcgcgttgaaggcgatcaagcgccagatcgtccccgttgatgcattcggcaatcgcaagccgcgactgcgcggatggcttcacctcgctaccctgccgctgtgcatcgcggcgtccatcgtactcatctgcatcgcgccggccggctcggtcaaagcggcctgcgcagtgtacggtgcctcggccatgctgctgttcggcaacagcgcgctgctgcacgtcgtgccgtggcgcagcgcgaaggtgactcgcgtactgtgcggcatcgattattcgaacatcttcctcatcatcgccggcactaacacacccgtgctgttcgcgctcagcccggcgattcgccggccatatctcacggtgatttgggtgaccgcggcgatcggcacgatactgcatatcgtctggctgcgcaccccgaactgggtgttcaccactgtgtatgttgtgctgggattggcgccggtgacgcttattccgcagctatggacggctcccgcagtgggtccggctgcgaccatactcatcgcatgcggaggcgccgcgtatatcgccggcgccgtgtgttttgcgctgcgcaagccgaaccccgttctcggctggttcgagttccacgaggtgtttcacttgggcacggtcatcgggtacgcctgccacgtcgtggcgatttatctgattgtctgcgcgctgtagtcgtccagcaattcatacaggatgcttcgaactcgctgtattgcagcgatttgaacacggcgcgggacagacagcggcccttaattctcggagccaagaatcaagtccttgaccagccagccgtgacggccgccttcatagacctcgtcagtgagccggtagccgcgctgttcgtagaacttgtagtggtcgttctccgagtgcacggcggccatggttccgccggcttgcgcgatgcggcgttcggcgtcggccagcagccgcgagccgatatgccggccttgtgcctcgggcagtaccgccaggcgcgcgatgatgtatcgcccgggctggtcgggatgatcggggtccgcgtagaaccgacaggtcgctacggggtgattctggctgggctgaatgggctggctgcgtgaggccaattgcgcggacgagccggggcgattgggcgcatcattatccgaatcgaacaccagcagatgcgcggacgcggcatcccattcatcgaattccggccgccagtcgcgttcgcggatgaacacctgctcgcgtatggcgcgggccgcgtcgggcagccggtcgtatgcttcgattcgtatggtcatgagcgtcagtgcaatgcgtcacgataaccgacaaagcccggctcgatggacgagtccgggcccaggctgtgctcgatggactcaggccgtacgcgcgatctgcacggcggtgccggacgcggtgaccatcagcatgccgttgtcggcgccgagcacctcgtagtcgatgtccacgccgaccacggcgtgcgcccccatcgcctccgcacgctgctgcatctcggcgatggcctcgttgcgggcacgcatcagctcttcctcatagccctggctgcggccgccgaacatgttacgcaggcccgcgccaagatccttgaacatgttcacaccggataccacttcgccgaagacgatgccctggtaattggtaatggtgtatccgtcgacggacggggtggtggtgacgagaatcatggcgaggctcctttggcttgtctgcgtagataccgctattctaccgtcagccgcatatgcatgactgtatgattaggggcaacaagcaatgacgcaccaacaacagggggatactatgagcagttcagaaccggagttcaacgatgcacgagaatactcgagccttgaagaagtgatgaacacactgctgacggcaaaggggaaatcattccgcgaactcgatcaaacgggaagagctctaacgggagggaacaagggttctctcggccaaatcatcgaagagtcagtcttaaaatatgccatcaactccgatgccgcacccgatattcatattggcgataccagttatgagttaaaagtcactccacttaagcacattaaaaaaggcaaacaaacctcagctaaagagcgcttagtcatcgatatcatcaattatctaacgctcgctgacgagaccgacttcgaatcttcaaaaatgtgggataaagcgaagaatatcatcctcgtttactactacgatgatcgcaccgataagaaaaaggaattgcgcatcgactgcaaagtgcttgcttcatatctcatgaagtatgaagcagatgatcttgctaccatcaaaaatgattggcatgtcattcgagataaagtcgcttccggccatgctgattcgctcagcgaatccgataccaattatttagccgcatgtacaaaaggagccaattccaaacaacttcgagaggcaccagcaccggcgggcgcgaacaccgcaactatatttgccaaacagcgtgcattcagcctgaaaacttcatacatgactgcaattgcgcggaaattattgaatcgaaagagcgaaaccgttcgcttgccgataccgcaagaacagaaccttgatgaatacgtggcagccaaattcattccctacaccggcaaatcaagcagagacatcgcctccgagctccaagtgtcagcagcgccaacagctaagaactataattcgagcctcgcttttgcgatgttgggcgcctcaaaatcatcaattagtaagattgaacaattctcgaaagctaatatcagccaatttaagtcagtaaccatatatcctgatggcttgcctcgcgagcatatgtcatttaaggccatcacggatgaccaatgggaggaatgggccaatccccaaaccacatgggaacagtcattcgtacgcgacttcttcgaaaccagcaagttccttatcatggtttcaaaatcgccgataccgtatcaatccggccatgacaaagcgaaggacattttcaaaggtgcattcctttggaatatgcctgaagacgacattgaacaatacgtgaaacccgtctgggagacaatgcataccttgctggttgcgcataccccgttgaactacgggattcgcggtaaaaatctcattccaggatcatctttcaattcagtgttccacctccgccctcatgcgagcaaaggaaaggataacggaagcgcgaaggaccggtccatcctgccgaatggggaagttattaccaagcaatgcttctggctcgatcgccgctatatagccagaatcattgccagtaacctatgaatcatctcactcagaacgtgaaacatcggcatctgcagcaattactacaccaatacgatgggggatgcctgtcaccaaggcattccccatgcagaaggcccgatgtccatccgtcataccggtgtcagtccagccacgaggaaacatctgcaactgatcgagttcatctggcacgagccgccgcaatctgccattttgttcaacgacatgcttcgtccggctggcaccacgaccgccttctccagtcaaaatggttcgactcggcttatccaaagcatcagggaacgccaccggtccttcggaatacgtgtattcatatccgttgcgagcggttcgttgctcctttttaccacccttaaggtattcccatgaactcaaattgtcttcgatgaaaaactctgatggcacttcgccaatcgagacgagcttatcgcccagaaccgaatgcttgccgctatacacaggcgtcgctcgacaggtgaatacctcaccatcctgcataacacctgcatccttgaattgggatactttcacgcctttgccaaatgtatgagtcatctcataggggtctttctcaatacaaaaacgctctactccgaaacggccatcagccacaatcgggaatgcgcgggcctctaccccactatggaaaaggcggtcttccatatcccatttcggggcatccaactctgcataaatgtatacgcggcgcctacgctgcggcattccatattcagcggcattaatcacatgccactcaacagagtaaccgagccgatacagacaagataggatgatggcaaagtcacgcccacgctgagagcttggcgacttcaacaaacggtcaacattctccagcagcacatatttcgggtgccgcatttcaagaagctcgttgatgctccaccaaagcacaccttttttaccttcaatacctgaggcaagggcaagaggcttcgccactgaataatcctgacacggaaaaccgccaaccagcatgtcgaactcaggaatcgaccgcttaccgtccttgacttcttgtagcacaacggcgatatcttcattaacgcaacttccctcgccgaatcttttttcgtagcaccgccaagcaaactgcttcgactcttgcccattgggttcccactgatttgcccacacggtcttgaaatcgccagctggcttcatatcaaactcggggtgcgcagcatcatggtagccatccagaccaaggcggaaacccccgacgccagcaaaaagctcggctatgcgtatagtcacaaaatcctctttttctactaatatactcacaaatgatcacaaaagatcctctaaaattacttaaaaaaatcaacttccacaccgaatcaacacataacgacacacttcttcgcaaggtagtttatgaccgccgccttacaccgttgacagatgagtgagtaccccattaatcaagacaagccttccgtttgcatcacagcatgccgaaaattgagcaccccctaagttgctatatcatcagtccgccaactttccgaggaggtatcctggacatcatgaatatgcagagcggcaatagaacacgtggaccgaaatggtcttacgacgagactcttgccacgttcggcttgtacatgatgttgaatcagcgacagcggaacgacaagaataaccctcatatcgcgcaacttgctgttggactgaatcgtaccgctagctcggtctatatgaaactcatgaatcttcgggctcacgaccccaacgaacacgcacgaggggtatcaggtttggcccatagcgggaaactcgaaatacaaatctggaaagaatatcaggagcagagcgataagctgctcattctggctttgaacgtctatgtcagtttcattgagaaagttcctctaccgactcaggatgcgcgcaatcgtcgaacaatgcactcgtctcccactccgcagaaatcgttggtggaagagacaaccagccttctcattgatgctccaagaccgcccatcgtcgcggggcaacagcagactacagctccactcggatctgaacatgagacaacagcattatcgcgggtcaatcaaagctactttcgcaatgctttgatcgcgaattatcacgacacttgctgcctgactggcatcaatattgatccgctgctaatcgccagccacatcaagccctggaaggtctcaaccgggttcgagaaaacaaatgcggctaacggcttgttgcttaatgcattccacgacaaggcatttgaccgcggatacatgaccattgacgacgattatcgagtacatatatccgctcgggtcccgcacaacgatatcaatgattattggatgtatcagtttgaaggacgctatattacattgccttcttcaaatccgccctcacacgagttcatcgaataccaccagaaacacgtgttcttgactgcctgaagggtctgcgagccgaacctctagtggaccgcaagcaaccacggcagcgacgccattacgccaagtgctagcaacttgacgccgccaaaaggctctcagcggcgtttgccggccaaaaactggcaggttgacgacagtggggacaccgatttgagccggcccggctgaccatcaactccgcaagcgtacggcggcggccattccgccgtcgccgtaggtggggtggagcatgaaggcttggctggcggtggtgtcgccgcgcatcaacgattcccacatggttaagcggctcatggagatggcttcaacgccgaggatggcgtcggcgatgtgcgcggcgtagagatcgcggtgcttggcgatcaggaagcgcatgagatcgaggcgcttggtcatgctggtcacgtttgaggaggccggggccgtgcggtactcgatcagcggctcgggggcgatgccgatatgggccgcgtcttttgcgggattctctgtatcccaggcactcccaaaacctccgacatgctcagtaccgccagtaaccccagcaccgcagatatcgttttccaccgccaatccgcactccaacaacgacaggaagaagtcccagtcctcgaagccgccgcgcatcgactcgtcgtagccgccgcagcgctcccacgcgacacggcgaatcatgcacgtggccgggcagcaattatgcgacacgaacgcggcggcattgccaccagtcggctgggccactgattccaggacaccgaaagtctgcagccagccggatgcggcgaccatcgttttgtcggcggacaacatcgacaacgtgcgctcaatgaaggccggccgcaaacggtcatcgccatccaacaccactacgaacggcgtttcggcggcggcgatgccacggttgcgcgcggcggaaggaccggcgtttgcctggccgatgaggtcgatggccacaccattcgtatccatcgccccgtgccggcaatcgtcgagagtggcgttcagcatctcgacggatgcgtggtcatcggacccatcgttcacgatgataatccgttccggacgaaccgtctggggccaatgacgactcgactgcctcgtgaatcaacgggccctgattgtagctggtaattaccactgtcactgctgccatggcggcaagtctatcgggtccggacgtgggccatccaccggcgctgcgcactgcctcccgccagtggggaggtggcgcgctatccccggctaacgctgatgcatgtgtgcgggcacgggcttggtgcggactttggtggtgaagtagtcggactcaatcttccacaccgtgacgctgcggacctgcgcatcggtgaattccacattcggcatatgcgcctgctgcgccatcagcgtctgcaggccgtggcggcattcatccagatcctcgaccagtgacgccgtgccattgccgacgatcgacttgaacgtctcgccccaattgcacgtggtgcggcccgccaccacctcgcagtcggtctgcatggtgaaagccacgggcagtcggccaccggcggcggcgcgaatcgcgtcgagcttgcggccgcgcggcgcggagtggaaccagagcgtcagcttgccagtcgcctcgtcgtactcgtaatcaaagccgaaattcagcggcacgatggtcaggccctcagcatccgcataggccacttcgacgatgtcgcaagcggcgacaatcgcggcgatctgctcgggattggtcacctcgcggtccgcgcggcgcatcatgcgatgctcgccggcgaccgtgtgctcatcctcacgcttggcgggcttgcgagcgcccgcaatattctccatgctcatgcctgctcatccccatccacaaccgaaatccagtcgccgtatccttcctcggccatgcgcgagcgcggcacgaagcgcagggcggcggaattcatgcagtagcgcaggccgccgcggtcggccgggccgtcggtgaacacgtggcccaagtgaatctgtgtgtccgacgtgcgcacttcgatgcggtcgcggcccggaatgcggtggtcctcatgctcggtcagcaagtcaccggcaatcgggcgggagaacgcgggccagccgcagccggaatcgaatttgtcttgcgacgagaacagcggttcgccactgacgatgtccacgtagatgccgggctcaaactcctcgtcatactcgttgacgaacgggcgctcggtagcggcgttctgcgtgaccgcgaactgctcaagcgtcagatcccagatgcgttccacgtacttctgacggcgttttacgttcgcgattgcggcgatcggtacatggcagtagccgccggggttgttcaccagatagtcctgatggtgtgcctcggccgggtagaagttgcgcagcggttcgaccagtacggccgggcgctgcggctggcggtcgaccagctgctccagagccgccacatacacggcgcgctgcgtctcgtccgtgtagaacatgccggtgcggtactgccggccgcggtcctcgccctgctggtccacggagaacgggtcgatgacctccaggaacagcaatgtcagcgtccgcaggctgacctgtgccgggtcaaactcgactttcacggtttcggccgcatcggtgccgcccgcgcagacctgctcgtaggtcggcgattcgacggtggattgcgcgtagccgaccgtggtgtccgtgacgccgtcgacgttctggaagtagcgctccagcccccagaagcagccgccggcgaagtatgcggtttgcgtatttccgtcattgtgttcgttacgttcgctcatacgccccacgttactacgtcgaggcggctcgcgatgcagtcaacgacacctctgcaccggcaaaaccgctttcgaggggctgatttgacccccgccggaggtctactcccgtttcaaggggctggtcggccgctagaccgcatgtaaaaacccatccgcgccaacgccattccgccgattttggagcgtgaatacttcggcatcagcccctcgaaacgggagtagacctccgggagagaccaaatcagcccctcgaaacggagatagcgcttgccgcgccctccttgtcaggctttctccgttcaaagaggtacattcgggcttctgcagaatgctatcttcgttcaaagaggcaccgaatacgggaaaccccgagtacaaacgttgtcattgcaacgctcatactcgggatttcagagttcaggtacctctttgaaggcagttagttgtccgcaagaggccaaatgtacctctctgaaagcagataccccgtctcaggctcgaatcggctagcctgcgtacccgtgtgcacaccttcacgaccgcagcgtactgagcatgccggccacttcggcgggcgtcacgctgggcacgtaggcgcgcaccaccgcgagcccgatctgcggcaacgccgccgggtccgggtagcacacgtagaccggcgcttcggagggctggaacttgcgcttgaagttgaacagcgagtggaagccgtaggcgggttccatccagtcggccacgatctgcagcgcgtgttggagcacctgcgtgccttcgccggccgccaccccaccttcccgggcattgtctcgctcggggttcatgccggccaagggtgccgcggacaggctcatgaactccacggcatgctcaggatccgcaagcccctcgtcgcgcaggcgctcggccatgcgcgcgatcaggaactccataatgccgttgggactgtcggtgcgatggcgcatgaagtccagcgtccagccgacgatgcgcccgtcgcgccaggtgggcagccagctggtgacgcccagcacgcgcccgtccgcgtcgatggcgtaaagcagccgcacgcgcgggtcgcgcagttcctcgacaccgccgagcgtgaacttcatttccggcagcgccttgagctgcgcccactcctcggagatgtcctcgatctgctcgcgcacatcgagcgacgcttccaggaacgtggactgcacatcggtcacgccgtcgcgcttggccttgttgatggtggtgcgcacatcctgccatttcttgccggtcgtcttccagccgcgcgggtccacgaccatttcgctgccgacctcgatggagctccagccggcctccagcaacgcgtcgcgctgttcgcgatgcacgctgtagaacaccggcgaaagcgaccgctccacgcaatactgggtgaagccggtcaggtcgtccatccactcggagggctcgccgaacggcccggtgcaggtcaaggcgatgccgttgagcacgcgatatgccacggccgatttgcccgtgggcgagagccagtagctgttgccttcccacgtagtcatgaagctcatcgattcgccgccggtttcgaccagccgctcggcgcgtgcctgcgcccgctcgttcgattcgctcacgtcgctcatccagcggatcaccacgaccagcaccacgatccagaacaccaggccgacgccctgatacacgatcgaggccatcggggtacgcggcacgaacgacaacttcatatggctcaggaagccgatgggcaggaagcgccccggcagttcggccaacagcgacgaggccgtggcacgcggcgagaattcatccggctgggcgatgccgtacatcaggtacacggcggcgcacgccagcagaaccagcacgatggcgccgacgccgccgatcagtcgccgccagccgacgcgaatcgggaaatgcttcaacgccgcagtcaaggcgacggcaaagaacagcggcggcaaggcgttcgccacgcaggcggtgatcgcgccgtgctgcagcagtgaggtcatgccgtccggcgcaaagctcagcggcacgatcaggtagtaggcgatggctactcccgcagtgaacaggttgatggccacggcacacatggccgcgaaccgacggccgcgatacaggccccacgccagcaccagggtcacggcggtgggcagcagcgaacgcagtaccgcgcccggcatcgaggctcgcaataggtcgaattgcaggaagcagccgctgtgcgtggcgccggccaggcagcgcgcgagcgtgccgtcgtcaacggagaccggactcatgagcaggccgaccgtgctgagcggccccgcgtgattatgcgaggtgatggcgatgatcggccccagcgccagcaccacggcgatggccgcaaacatgcgccgcgcctcgaaggaggtgctgcgcagccagtgccagccggtctcggcatgcgcgggcggcccggccatcacgcggccggccgcgtgtccgatcagcgcggcggcgagaatgcagtaatcgccaggattgccgctgtaaagcagcgcgaccagaatcgccacgtagccgatcagccgaatacgccgccgcaacagatggctgcagaacgcgctggccgccataagcgcgccgaccggcaacaccagcgggctcagggcgaactgcatgcgggagacgaattgggagtcctggaacagccatccggccgccgcacacaaggtcaggcccacgatcacgccgccgagcgcgcaggcgagcgcggtgccgacggtacgtgcgcggccaagccacggctcggcgattgacagcatgacgagccacagcgcggcatcaagaatgagctggatgacgccgcgcgccaagaacagcgtgcagaagagtttgccgaaatcgaattcggccatgctggtgtcgagccgcagcgggaacgcgaatccggccatcgcgaccaccagccacaccaccaagttcagcaccaccagcgccaccgtggcagtgatggccagtcgatgaccgtccgcccactgtcgcacgtcgccggccagttcgcgccagctttccgccgcatgactgttgtgcttacgcgattcttcgctcattgcaacacctccacttgtgggtactccttcaacgatttcgtcatctcgcccaagccggtccgttcgccgaaccagtcgagaccgggccgccagaccgcctgcaccgcgtgccagtcgtggccggcgccgggcacgatcagctcggtgacctccatgccggctttgcgcgcggcggcggcaatcgtgcgcatgttgctaatcgattccttgtcccgttcgccagcaccggtgaacagcgcctgctcagatgtgccgctggaggcgatggcgttgaccggcacctgttcgtcgtatgccttgcggtcgccggcgaaatactcttggaccatcttgccgacgctgccgttggtcggcttgagttcgccgtccaccggcaacatcgcgccgtagatttcgggatgacgcgggacgagctgcgtggtgcaggtgccgccttgcgagaacccgcccatcgcccacatgcgggccgacttggccacgggcagcatcttcttggcccagttcaccacgtctgtggtgaggtaggtttcggcgttgccttgcgtggtgtcggcgcacaggctgttgtgcgtggcctcgccgttctggtcgggcacgagcacgatcggcgcgagcccgtcatgtttggcggcgtacgcattcatcgtggcggcgatgttgccggcgtcgatgaggcgactgggctaccgggctgcccggccaacagctccatcactggcaaggccggcggacggtcggacagcgcggcgggcggcaggtagatcatcgccttgcgggccgtgaagttggatttggcgttcggaatgtcgacggtgagcaccttgccttggctgggcatggacggcaggctgcccttctgcgccttgctacgccagtcgctgacgctcatcgcggccttgtgtacctcgattgagccgagcgaggcgtacggcgtgtagccgacgagggtgccgatggtctggtattcgccgtaaatcgagtccacgccgagcgcggtggacagcagcaccagcggcaccagcacgatggccagcacacggcgggctccgcgcatggtcacggctgcggcgatcacgaagccgacgccggcgatgccgcccgcgatggtgaagatcaccggccagcccagcgatccgccaaacaccataaacacgtcggacaccagccatgcaaccagcattccagccgcgccggcgagcacggcggcaatcagcgagacaatcagcgggtgcaggcggccgcgcttattgctcttgctcagcgccagtccaataaccagtatgattgccgcgatcgcggtcagtccgaacacggtccgtggcacgattccgcggaccagagacaattccatgaacgttttccaaacggagttcttcatccttcaccccccgcgctccaggctcctcgccttgtaagctcacgcaacactagcgcgcgattcatagagcgtcacccaatttcacaaaaattgtcgcgagttctcatggtttccccagactccgttcagcacctgttcacatccggtctggacgtccgcagctcaaggccagtgtcagcgctggattagcggcgcgcaggcttgtcccagcttcagccggaagcagggaatatgctggtggatatgactcacgcaaacgaacaacgtccagcagcgaccggcaatgccgccgataacgtgtctgacgcccctactggccccgcgacgagcgcggcggcaaggcccacgaccgtcacggctgatggcacaacagccacaaacgccgcggccagttcaacagcaaaacccgcagccagcacctcttgggccagggaaaccaacccacgtcgagcactgttgacgattatcgtcacggtggtggttgtggtggccatcgtactggggctcggattcttcgtgaactggggattggcggcccttttggtgatcattatgattccgggggcgatttcgctggccgttctcgccaagcaccctgaatccaccggcgggcgcagcatgttcggcatctccgatccgaatacgctgcttgacccgattcgccgcccgtccgagcgtcgcggcgagtaagttgctgctgcccatcgggcggtaatttatccatggggcggtaaaaggcccatggggcggtttgaagaaattgtgaaaccgcagaataaagtcattttgggataccgccccatgagggttttaccgccccatgggattattaccgccccatgagcaaagccaccccgctatttgcgcgcactgaccaagtaattaagcaccgatccgacggccaccagcagcgcgccacaccaaaacggcagcgacagcgctaaacccagcaacaccgcactggccccggtggacagcaccggcgtggcataggacgcaatagccagccgctccatagacccgtgcagaatgccatagccccagcaggcataaccaccgccaatcgccgccgcggcaatcaacacaaacagccatgcgaccagactcggcggctcggccggccacccctgcccggacgcgaagtggataatccacaacgccacggccacgcaggggaagaacaatgaagtgccgtccaccccatgactcatggctggcgtgaacaccgcgtacaccgaccaagcgagcgcgcccacgaacgccagcgcatagggcaaagggttggcggcgatatgctgcacggccgcatgccagtcgagcccggaattaccgccgaccgccaacaccacgccggcagtggccacgatcgcgcccggcagcaccttgacgaccgcgtgcttgcgatgggatacgctcgccgacagcagcaccatcatcgtgggccacagatagttgaccaggctcacttccaccgaggatgcgtcggtagaggccagccccagcgagagggatatcgacgattcgtaaaatacgaacaacaggccgccgataatcaggtatttcttggggaactcgcgaatcggggccgggcgccggaacatcagcagcaggatgccgccgaccgtgtaaatcagggccgagccaagcgtggcgccgaagttttcggagacgatgcgcacggtgccggccatgaagctccacagcaggattgccatcaggccgatggtcgtggcgcgcgcggatacgacgtggccgccggaatggcttgccgccggtgccggtgtgccgcttgcgttctgtgcgccgttcgccatatgtccgcctctctcgcatcgtttcgaagtcactctacccatcggatgtgtacagcggcagaacggcacgcgaccggcgcgcgaacagggtggggttcggtgattgaaacagcaaaatgccgggtagggtaaatccctacccggcatttgcattggctatgtttcccgccgtctgtcaggttagtcggcgttgaaagcgtagggcagacggcgtgggaagcatggtttggttacgatttatctctcccccacccgcttcgcgggagccccctcgtcagagggggcaaagctactcgaagcgggacttcgggacgaatcaagtatcgtcagccctcaatcgcgatttggtgcttggactcgacttgcggctgggcctgcatcttcggaacctggatgcacagcgtgccgttccggtagctggcgtggatgtcggactccttcacgtcctcgccaacgtagaagctacgcgagcaggagcccatgtagcgttcgcgacgcagccacttgcccgaatcggacgcgcaagcacacttgctgtcggaagcctcgtcctcagcggccggagccttgtcctcatgctcgctgcaacgcgaggcggacacggtcagatagccgttgttgagctcaaggttgatatcttccttcttaaagccaggcatatcgatgtcgacgtcgtaacccttgtcggtctcgcgcacatcggtagtcatcatgttggcgggcattacggcactcatcgtgttgtccgtgttgcgccaaccctcaaagaacggatcatcgaacagatccgagaacatcgtgtcattcatcaaagccggaaacattgccataatcggtactccttgattaggagagaatcggcttggctgccggccgccaacccgtatcgcggggctagcagcggttatcgtggccggttccggaaccctcccgggctctcaacctttaaccttcacttcatccaattcccgagcgcggcaatcattccgggattatgcccacagagaaattgcggcgggaatggctgccggtaaagccggccgagccgagcgccgtgaccaccctcagccagtcttacggctgccagctcccgccagcgggagcatatatacgcacaccagtaggcgtactcatatacctctgccaacgggagcatggttgcacgttcccgcaaactccgccaacgggagcatgctggcgcgcgaacggctcacatctgctgggcgttttcgagcaaggcgtttttgaggtcggactcgatttggcgcatcttgacctgggcggcctcgcggttggcctcgccttccttctggatctgcacggtctccttcagggtggcgatgagttcggcgttgatcttctccagcgtgtcgatttccaccacggaacgctggttggccttttccgcgtccactgcacccttgtgcagggcggccgcgttacgcgccagcagcttgttggtcacatcgtcggccttgttctgcaggtcgagaaccttgcgctggttggacaggcccagcgcgatcaccatctgactcttccacaccggaatcgtggtggagatggtggtgtcgatcttgtccacgatggtctggtccgcgttctggatgattttgatctgcggcgcggtctgcaaggtaaccacgctgatgcggtcgaggtcgtcgagtcgcttggcaaaacggtcgagcttggacttgaagttcttcagcacttgcgcctgcatggcgtcgccactggcggcggcctcggcctccagcgctggcagctggttggcgttgaagtcggcgagcgccttcttgccggccagtacggtcattttcagctcgcggtattgctgggcgttctgcgtgtacatcgtgtcgtacatggagatgtcggccacgagtttggcttgcgcggattggagggtggtgatgaggtgttgcatggcatcgttgttgggcagttcggatacggccgggatctggtcgagcgtgccggccacgccgaatcggctgatcgaatcggtgccggcgaagttggccgcgcggaagccatggcgctcccacgccagcttctgcaccgccggtgttttcaacaggttcagcagtgtgccgccttttctcgtccaaggccatcagcgtgtgggtgctccacacggtcggcgtcgggtagacgatgaccacgtcgtccttgatctgcttgaacgcatccggctggttcacggccaaatcaagcagctgcgattcgtagcccaccatcatcggcttggagcccacgcccaaggtcaggaactggttgaacgaatcctcggaagaggtctccatccagccggatttggcgaagatggaggcgatggtcttgccgtcgcgcgccaccgaatcgaccatggccggctgcccgccgttgagcaccgtggcaagaagcgccgcgtattcgttgcctgagttcgacttcaccggatcggtcgagtcgatgcggaactgcccgtagcctgccgtgtatccgacgtcggccatgttgtgttggcgaccatcgcgtccacggctttggccatatccatgtggtacgcgccagaatcgtccttggtcacaagtccgccgttcacgagcccgtccgccacggccttgtgcgtgtatagcacaatcggtgagttgaagacgatgtcgctttggggggccttgacgcctttcgcattgccgtattcgacggccgcgcgcgaggaggggaacaggtaatccatgcctttccggtccgtatccatcatggccggcgatccggccttgcgatagtcgatggcaatgccttgcttggcggcgagcgccttgaacttggcgtcatcgaacaggccgattttctcgccgcccaggtagccggtgatgctcacctgttcggtcggttcggccggtgctggttgcgattgccgccacaccagcgtgccgcagaccacgcccactaccgcaagcagggcgatcagtccgatgatttttgatttggagagtttcattgtgcgtccgttttctggtccgactggtgagccgggccgccagatggagtctgactgggtgcatgccgtccttcatcagcagccgaggaaggcacaggcgaaggtgcgacgtcgtcgtatccatccatgcgggccaaccgttggatggcgtcggagtcggccgtaatgcccaacgtcttggcgcttaccgcccggctgagttcgccggcggcggtctgttcgagcacttgcagcgcctcgatggtttcgattcgtgccgtggctatctgatcgcgtgcgccggaactttccacgtccacgtaggagcgcaacagtttctcggtctgctcgccgtacacggtgatgtagtggcgcaacgtcgggtaggcggaggtgtctcgggtcacgtattgcactaaatctttggtagcggcgatgaagtcgttggcttcggctttgacggctgggtcacgtacttgcttggtgagcatggcgatcgagttgagtcgagcgttcgccgcgtcgatcgtatcggcggtcttctgaccgttgggcaaggcggaaaccagcattttgccgatgcgtcgctccggctcggtgagcgtggaggcggcgatatacccaagtgcggccagtaccacggccacgatcaggccgggcactccgccgccgaccagtccgaaaccgagcccggcgagcagcagtccgacaacgaatccacagattacctggagcatcagttgaagcccttggcttggcggaagacggcggcgaggtcgccggagcggccgtcgaataccttggcgttgctcagggtggcgagagacttcagctggctgggatcggcatcgccgaacatgatggagaagatcggcagatcacggccacgcgacttataggcgctttcgaattcgtcctgatgatcggagttggagcggccgtcggtcatgagcacgatggcggtggtgtattgcgaggcttccgactcgctgggcagctcgtcgagcgcgctcagcaggccttcatagatatcggtgccgccgctggcatcggtggcatcggcctcatgcagcaggtcgctggtgcttgtgccagtggccttgaccgggcggtgggcctcggtttcaaacgggatgagaatgttcacgtcgccgctggcgggctcgatgtacgacttcttggcctggtccgggtcgagcgccgcgttcaggcctttgaccacgccgttcttgccctctccagacatcgaaccggagtaatcgaccacccaaatggtccagctgggtttcctgagcgcggtctggtagacgttgagcgcgctgtcgatcaccgtggcggaggtcatggagaacgtgagtttgccgtcgctgaccgcggcgaggatgtccgcggtggagacgggcttggcggcaccggtgtcgtcagcccagccgagtttgacggccttggatttggcgatgccgaacacgatcggcgtggtggaggtgctggccgcgtctttgacgatgtgcttggtgtctcccatcgaaatccacatcgaggaggcaggccagacggcgtcgtgatcctggccgccggccttgagcgcgttcataatctccagcgaacccatgtagtgcatcgtcacggctacgttggattggtcggccgctttctggatggcgacggcgacttccttgttttcggagccggaggcaatgctcagggtggcagtcggtttgccgccggacggctggaaggtctgcgtggtggcggacgtgccgttgccgtccgctgtgccgtcatcggaattattgaacgccgtgcaaccggtcaacgcgagcacgccggcacatgccgcggccgcaaccgcggcggcgcggcggcggagagaagacattatgcccataattccatggctctcccgccatctaaagcgggccgggccacaaggtgaccgcacggtgaacaatgggtgaagagctacatcagtacgcggcgcaggcaatcatggggtcgtcgtagaagccgaggatcttttcgaggtagggcttgtaagtgctgttgggcatggagaagatttcgtggcgcgattcggggaagcgcacgatgttcgcctcgccgccgccgtccttgaccagttggacgaagtgattctgcggcttattgagtacccagatgtcgcgtccggactggaagagcagcaccggcgtctccacttcggcgcaggcggacggattcagtatggcccggttgagcttcaacgcttggcgcacccattcgaacgccgcgcagtaggtctggtattcgctattctcgcaacgcagcttgaagtaccagcgttcacgcgcttcggaagcgccctcgttgccttccatcgagaattccggcgtgaagcccgactgcccgaacacgcgcttcttgccgaagccgagtccgcacagcgcgccgaccagcacacgggccacgcccagcggcatgccggtggcgggggcgatcatcggggcagagagcaccgctttgtcgaacagggtggggtatcgctccaacacggccgcgccgatgccgccgcccatcgaatggcagaacaggttcagcggcatgccggccgcgtactgctggccgatggtttcggcgaagccggccagatcggccacgtagcgctgccagtcatcaatccacaccatgcagcggttgtccacgtcgcgcgcggacttgccgtggccgcgatgctcgagtacacacaccgagtagccggcaagcaggaagtaccagacgagctcgtcgtacttttcggcgaactcggtgaagccgtggctgatgacgatggccccgcggaaggtggcggtggcgccttgctcgcgaatcgcgtcgaatttggcggagtcgtagcacaggtagtgcagctggcccgagcggccgccggtgtccataatgccggacagcggctcgatcccggccgaacgttcggcggcggacggatcgaaccagccctcctcgcagcattgttcgagcgcgggcagcaccacgtcggtcatcgtttcggcgtacttgttttcgtcgatcatcgtcacctgcatggctcccatcttaggacaagcctcacgcccacacctcgcacccacaccacgacacattcccgggaatgcgtcgcaagcctgcgcgccactgaccgcacaggcgcgtaggttgtgaggtatgagcgaaaccaatgatgtcaatgacgcaatcaagcatttcccacgcctccgggcgcgcacgctgcgcttcggctgcggcgcaccgcgctccgcacagaccgtgggcgacggctcgcgggccctgttcctgcgctccgacggccccgaggatctggtgaccgcactgtggctgagctggttcgacgagtccggcgaacaccatgagaccaagctggccgacccgcgcgaactgctgggcgcaaccgccgacagcgaggacgtgccggccgaggagaaggcccgccgcgagcgtgcgcgcgaaggcggcaccggcatcgtcggatactccgcagatgacgacggcaatcgcatcgtgttcaccatcaacggccgcctgttcctgaccgacatcgattggaatgacgagaccggcgcacccgaaccgcacacccgtgaactggccggcgaatggctcgatgaggacccggcgatgtacacgccggtgctgaacccgcgcatcgccccggatggcgaacatgtgctgtacaccacgggcagctacctgatgctggtcgatatcggcggcgagctaggtgaccgcatcaccgcggtctacggcgtgagcgtggaggatgaggacggcaatccggccgaaaacacgtggaaaatcggtctggccgagttcgtggccggcgaagaaatggaccggtacgacggtttctggtgggccccggattcgcagcatgtgctgttcgagtctttcgacaccgccgacgagccgacctggtacatcagcgatccggccgaccccgagaagccggacgccggccgccgctacccgcgcgcgctgacccgcaatgccgacgtgtatctgaccgtgatcacgctggcgttcgatgagaacgaccggtacgcgggcatcaccggcaacgccgatgtggattgggatcgcgaggcgtacgagtatgtggccgccgtgaactggcgtcgcggccacgatccgctggtgctggtgcagaaccgccgtcagacccgcgatcaggtgcttgaggtggcagtcgcggcggatggggccgcgctgggtgccacgcgtgtgcttgaggagcacgcgaacgagcagtggatcgacctggttcacggcacgcccgcctacacgccggatggtcgtctggtgtgctcgctcaacgatatggccacggacaccaaccgtctgacaatggacggccgcccgttcacgccggctggctggaacgtgcgcacggtgctcgccgtgaccgacgaggatgtgctggccgtggtgcagcgcgcgcccgaaatcgcgcctgaggtgccggacgcttgggccgatgcggccgccaccgagtccgtattcggcgaccacgacgcccgcagtttcgacgtggtgagtatcgattacaacggcacgatcacgccggtcacgaccgatcccggccagtggaccgcctcgcgcggcgagcgcggcatcgtggtctccggccgcgatatgcgttccgcccgcgcccagatgcggcatattctgggagaacagagcgccactatcgcgtccacggcggccgaacccggcttcacgccgaacgtcacgtttacgcgactgggcgagcaccagctgtacacggcgatcatcgcgccgagcccggaaagcccgtacgcgcatgccgagaagctgccggtgctgatgaagccgtacggcgggcccggcttccagcaggtcatcgcctcgcagtccttctactgggagggacagtggtgggccgaccagggattcctggtggtcacggcagacggccgtggcaccaccggccgcggcccggcatgggaccgcgaaatcttcgaggatatgaaggacgtaacgctggccgaccagattgaagccgtcaacgccctgcccgaggccgtcgcccggttgaacgccgatgcggaatcacgtgcggcacagccggctgcgggcgatcaggcagacgccgagaaccacccaccggcgcttcgcgccacctcccgccagcgggaggcgattcccatgccggacctcgacaaggtgtgcatgatcggctggtcgtacggcggcttcctgtccgcgctggccgtgctggacgcgccgaacgtgttcaaggccgcgtgcgccggcgccccgcccaccgactggacgctgtacgacacgcactacaccgagcgctatctgggcctcgacccggatgtctactaccgcaacggcatcgtgcaggacgcaccgaaactcgagcgcccgcttatgctgatccacggtttcgccgacgacaacgtcaccatcgcccacagcctgcgcctctcgcaagccctgatggcggcgggtcgcccgcacaccttcctgccgttgacgggcatcacccatatgaccaacgacgagaccgtggccgaaaacctgctcaccctccagcgcgatttcctgcgcgacgcgctggcctgacagatcgataacacgcgcattccacccgaggtgctccaccggtaaagcgcctcgggtggtgcgccgcacccatttccgccctgaatttttggaaattttgcactcatcgtcatgtgaaagaccggttttttgcctcatattcccatcaccgcgtaggatgggtgaagattagaaagggaggactatgagcgttctcgaccgttttgaaaaaagcgtggaaggtgcggtcaacggagtattcgccaagtttggctccaaagacctgcagcctgtcgatctttccagcgccttggagcgcgagattgacgccgaggccatgcccgtgggccgtgaccgcacggtggccccgaatgaataccgtttcaagctcagcactcctgacttcgaccgtatcgaggcatggggtagcgagaccctggccaacgaactggccgataacctcaccgagtacgcgaagagccagcattacgccttcgtgggcccggtgatcgtgatcttcgaggaagaccttgacctgtccaagggcaacttcaacctcacctccgaatccgtgcagggcaatgccgtgccggtcaccaccgatgcgcagaccgaggatagcccggtgctcgaggtgaacggtaaccagtacctgctcaccaaagacaagacggtaatcggccgcggttccggttgcgatatcgtcatcgacgatccgggcatctcccgcaggcacctggaaatcgacatcacggataacggcgtgatcgcccgcgacctgggttcgaccaacggcacgtacgtggagggccaccaagtgcccgccgccacgctgctcgacggcaacaccatcaccatcggccgtacccgcatcctgtactgggcctccgcccaagcccaggagtagtcgagcacacgcccgaaagtcgtccacttatgaccgaactgacattcgccctgctcaagtatggattcctgatcctgctgtggatattcatctggctggccgtacgttcgctgcgcaaggacatcgagacgttcagtccgcgaccttcgcgcgcgcgtcgtcgccgtgagcgtgaagtgcataaggccaaggccgaaacgccgcaggcagctgcgccgcgcccgcatcgccagcccagcgcttccgcgtcgtccgccgcctcggcgcagcctaccctgttggtcatcatcgatggtccgcttgccggcagctccgtgccgctggccgaagccgacatcacgcttggccgcgccgcctcgaacaccgtggtgctcgatgacgaattcgtgtcttcccaccatgcccgtgtctaccgtgacacgcgctccgggcagtgggccattgaagacctgaactccaccaatggcaccgtggtcaaccagcagcgcatcaaccgccccaccattctgcccgctcgtattcctgtgcgcatcggcgccaccaccttcgaactgaggtagccgcatgccaaaatccgccgcttcacaaccgctgttcctgtattccaccacggtgtccgatgtgggcaccgtgcgcgcgaacaatcaggattcctccttcgccggcgagcatctcatcgccatgtgcgacggcatgggcggtcacgccggcggcgatacggcatcctccatcgccatccggtcgctggcccacatcgagcaggatgacaccggtggcaacgtcgagacgatctcccgcatgatggaaacctccgttatggccgcgcatgacgccatcgtcggcaaggccaagcgcgaacgcaagcttgccggcatgggcaccaccgttaccgcagtggcattggtggccggctactgggtcatcgcccatatcggcgattcgcgcgcctacctgctgcgcgacggacgcctgagccgcatcacgtgcgaccacagctacgtgcagcacctcatcaacaccggtcgtatcaccccgtccgaagccaagaaccacccgcagcgcaacgtcgtgatgcgcgtgcttggcgactttgacattgacccgcgcccggatatttcggttcgccgagcccaccccgccgaccgttggctactgtgctcggacggcctgtgcggtgtgctggaagattccaccatcgaagagacgatgaccacgctgtccgatcagggcgaatgcgcgcagcgtctggtgcagatggcactgcgggcgggcagcaccgataatgtcacggccgttattgcggatgccacgttggcgttggatgccgatgcgttcgacctgccgcaccaaacgccgttggtcggcggtgccgccagccgtaatcttgagccgattgccgacatcgtcaacgagccggtggctaccgcgcccgcactgcgtgaggatgattcccccgcccagcgcgccgcagcattgattcagcccgccagcgcgcacgaggcggagaccacgcaaaccacggccaaaccgtcgtccacacgcgtggtgcagccgtccaccgtccgcgaggagaccggtgaacgagccaatcccgataccggtgagattccggtggtgcaaaagccggatgggcgcctgtccgccgaccccaacgacccggatgtggccaaagccatccgcgatgagcaggtcgagcagaagaaggccacgcgcaccaagaagcgccgcaataagcttgcggtgattattacctgcattcttgccgtgctggcattggccggcgccggctggggcgcgtacacgtggagccagacacactactacgtgggagatagcaacggcaccgtagccatttatcgtggcgtgccgaccaatctctttggacttgagctttcgcacgaagtgcagaccaccaatatcgccaccgcggacctgcctcagacatggcgtgaccagctgagccaaggcatcacagtcggttcgttggacgaagcgcagtcgcatgtgggtattatccgcaccgaaatgcgcaaactggccaagcagcaggaagccgacgccgccaagaaggccgaggcgtccaattccccggacagttccaaagacagttcccagagcgattccaaggacggcaccaaggattcgtccagccagtccggctcctcgtcagacaagtccggttcgtcaagctcatccgattcctcggataaatccggtatcggagcggccgacaacgcggccacgggagattctcaatgatcgctacccgtctacgtcagatttctttgttgctgattgccatggcaatcagtgcgttggcgttcatccagatgttccagcgcaccgccggcgaattccctatgcaatacgccggcatgctggcattggtcgtagtgctgtttctggtgctgtgggggctgattgtgcgcttccagccgtacgccagccagtcgattctgccttgcgtgctactgctgaccgccactggcgtgaccatgatcgcccgcatcgaccagagcgaaggttgggcggttgcccaacgtcagctgatctggctgtgcatcgccatcgtgctttccgcgctgctcatcatcttcctgaaggactaccgcgtgctgcggcgcttctcctacgtgtcgatggtggtgggcttggtgctgctgctcgccccgatgctgccgtttgtcggtcaggaagtgaacggcgcgcgcatttggatcaggattccgggactgggccagttccagccgggcgagttcgccaagctgttccttgcgttcttcttcgccgcctacctgttcgaccatcgcgaccagctggccgtgggcggtaagaagatgctcggtctgcagctgccgcgtatcaaggatctcggcccgatcatcgtggtgtggatcgcctcgatgggcgtgctcatcatgcagcatgatctgggcacctcgcttatgttcttcgccatgttcgtggccatgctgtacacggccaccggccgtaaaagctggatcatcatcggtctgatcgcgttcgccgcgggtgccgtgctggccgcaggcatgttcagccacgtgggtcagcgagtcgatgcctggctgcacccgttcagcaacgagcaatacaacaagacccccggcggctcctggcagctggtcaccggcattttcggcctggcatcaggcggcatgctcggcaccggtctcggccaaggccatccttcgctcgttacgtttgcgaactccgatttcatctacgcctctctgggcgaggaactcggtctgatgggcgtcctggccattttgatgctctacctgctcatcattgcctccggctttatcaccgccatgaaaatcaaggatggcttcggcaagctgctcgcttccggactggtgttcaccatggccttccaggtgttcaccgtggtcggcggcatcacgctggtgattcctctgaccggtctgaccctgccctatatggcggccggcggctccagtctgatcgccaactatattctcgcgaccctgctcatcatcatctcgaactcggccaatgcgcccgagccggagctgacctcggatacgttccagtacgaggctttggccgtgctgcgcaacaaggaacttgaggcccgggcccgcgccactgagccgatcgttcagcctcgcagcgcgtcggctacggcgtcgcagtccgagtcggaatcgtttgacgaccccatcgtggataccaccactccgtcgtatgccgaagccgatgaaccgtacacgcctaccggcacgattcccccgcttcctcccgttaacggaggcactcgcgtatgaacaaatatcttcgtcagcttttcaccgccgtggtcgcgctgttcgtgattctcggcctgtcgtccaccatcatcatggcggtacgggccaacgcgctgaacaacgatccgcgcaacgcccgttcgctgtaccaccagctcggcgcctaccgcggtgccattctggcctcggacggcacggtcatggccaaatccgagccggtcaacgacgcgttcaaatacctgcgcacctattccaacggtccgctgtatgctccggtcaccggcttcttctccatcaaccagaccgccgatcgcggcctggaagcctcccgcagcatgctgctcaacggcgaggccgattcattgatctggcagcgggccaaggccatgctcaccggcgctacggatcagggcgcgtccatcgaaacctccatcgaccccaagctgcagcaggttgcctacgatcagctcggcacgcgcgatggtgcggcggtggccatcgaagtcagcaccggtcgtatcctcgccatggtgagcacgcccagttatgatccgaacaaactggcgacccatgacaccaaagccgcgtctcaggcctacaacgaactttctgcgggccaaaatagcccactgatcaaccgcgccacctcgcagctgtacccaccagggtccacgttcaagaccatcgtcgcctcggctgcgctggaaaccggcgattatcagacggacacgaagattcctgcgggctccagctataccttgccgggaaccgccacacagttgccgaacgccgaggcacaggccgatggcgtaaacgggcagatctccctgcaagaggccgtcgcatggtcgtccaataccgcgttcgcccagcttggcgtgaaactcggcgcgagcaaggtttcggacatggccaccaagcttggtttcggcagcaccatcaccattgacggcaccgaatccacgggcaccccgatgacggccaccgcgtccacattcccctctgatccgaccgacgacaagcttgcgctggcgtccatcggccaaggcgacaccacggccacgccattgcagatggcgatggtcgcgcaggcaatcgccaacaacggcaaactgatgcagcccacgctggtcgatcgtgtgcgcgccgccgatctcaccgtgctttcgcagaccaagccgcagaccatggccaacgcattcagcgaggattccgcagacaagctcaccacgatgatggaaagcgtggtgaccgaggccaatccgcagctggccatcgacggcatcaaggtggcggccaaaaccggtaccgcacaaatcggtaccgacaactctgccatcgacggctgggtgatcggtttcgcgccggcggacgatccgcaaatcgccgtcgcggtgttggtgcataacacagatgtgtacggttcgctcgccgctggcccgatcatgcgcgcgatgatgcaggaggctttgcagcagtgaaacttatcgaaggacagcttattcaccgccgatatcgtcttgattcgcgtcttgcgcaaggcggtatgggcgaggtctggaaaggctacgatattcagctcggccgtgaagtggccatcaaggcgctgcgctcggacgtgaccaacgccgaggccaagctacgccgcctgcgtgccgaagcccataattccgccaatctggcgcatccgaatatcgctgcgttgttcgaatactacgagcatgacggcatcggctttctgattatggaatacgtcccctcgaaatcgttggcggacctgttccatagcaagggcgcgatggatcccatcgaactgctgcccatcctgattcagaccgcgcgaggcctgttcgtggcccactcgcacggcgtgattcatcgtgacgtcaagccggccaacatcatggtttccgacaccggcgaagtgaagatcaccgatttcggtgtgagctactccacgggtcagggccagatcacccaggacggcatggtggtgggcaccgcacaatacatctcccccgagcaggcgcagggccagcaggccacgccgcaatcggacatctattcactgggcgtagtggcgtacgagggccttgccgggcatcgtccgttcaccggcaccactccggtcgatatcgccgcagcgcacgtgaacaatcccgtgcctccgctgccggactcggtggacgtccagttacgcgaatttgtcatgtcaatgctggccaaggacccgttggatcgcccgaaagacgcgctggtggtgtcccgtacgctggcacgcatcgaacgccgtctgctggatcagcagaccgaaatggccaacaccgccatggccacgtccggcaatcgactgccgcgccgagtgaccagcacgccacgcattgttttggaggccccggcctcaagattgggagggaataagcaatgagcaccagtatgcccaccgcattggccggcggacgctaccagcttggccagctcatcggtcgtggcggcatggccgaggtccacgtggctcttgacacccgtctgggccgtaccgtggccgtgaaaatcatgcgcgccgatctggccaacgacgacatcttcctggcccgtttccgccgcgaagcacacgccgtggcccagatgaacaacccgaacatcgtgaacatctacgattcgggagaagaactggtttcttccgaaagcggcgatgccgagcgtctgccatacatcgtcatggaatacgtcaagggccagaccctgcgcgacatcatcaaggtcaacggcgcactcagccagcgcgactgcgaacaggtgatgttgggcgtgcttaacgcgctcgactattcgcatcgcatgggcattatccaccgcgatatcaagcccggcaacatcatgatttccgagcagggcgtggtcaaggtcatggacttcggcatcgcccgcgctctggacgattccgcagccaccatgacccagtcgcagggcgtggtgggcaccgcacagtacctttctcccgagcaggcgcgcggcgagaccgtcgacatgcgttccgacctgtattccgccggctgcgtgctctacgagatgctcaccggccgcccgccgtttaccggcgattccgccgtggccatcgcctaccagcatgtttccgaagtcgccacgccgccatccgccgcggtgccggggctgccgaagatgtgggattcgatctgcgccaaggccatggccaaggaccgccagaatcgctatgccacggcctccgaattcaagaccgacatcctgacctacatgaacggcggcgtgccggtggcggccgcgttcaacccgttgacggacctgtcgaatatgaaggcccgcaaggaagccgaacgtgatttgcccaccacgccggtggaaccgcatcagcaacccacccaggcattcaacccggtgaccggtcagttcgagcagattccaccggccaatggtgccaatgcagcggcgttgcagtcccgtgcgcagcagcgtgcggcggcggccaaggccaagaagcgcaagaagatcatcatcggttcggtgatcgcggctatcgtcgcggtgcttgtcattgtgggcatcgtgttcgccatgaacggctccggcaacaagtcctcggaagacaccgtcaccatccctgaggtgtgcaacgcttccacgtccaaggacaacatcaagctcaagcttgaggcatcgggtttgaagatgaccgaaaagcaagacaccgactccaccgagccggaaggcacctgcaccaagatgagcccggacgccggctccaaggtggccaagggatctgccgtgaaggtgtggttctccgcaggcccgcagtccactcaggttccggatgtcaaggaacgcagccaggaagaggcgcgcagcattctggaaagcgccgggttcaaggtgaacgccgccgtcaaaaccgaagacagcgccgacatcgccaaggatatggtgacgaaaaccgatcctgccgccggtcagtcggttcccaagggcaccaccatcaccatatatgtttcttccggcatgaccaccgtaccgagcaatttggtcggtcagtcgaaggacagtgtgctacagcagtatgagggcaagttcagcttcactgtggagcaggagagctccgatacggtggaggccggtctgattacccgtgtaagccctgattcgggctcttccatcgcacagggcgggttcatcaccatttgggtgtccacgggcaaggagaaggtcgctgtgccgaatatcaccgctggcactgactacgtcaccgccgaactcatgctcaaggccgtgggcctcaaggctcaggccaatggtccaaccggcagcaccgctgtggtagtcagcatcaatcctggcgctggcagccaggtagatgcgggatcgaccgtcaccattaccacgaaggccggcagcactggcggcggtaccggtaccggagacggtggcaacggtactggcaacgggggcggaaccggtgagtgaaccggtgagtagcaagtaagcgccgggcgtgtatgtgttgcgcatatgcaacgcaaatagcgcaacacatacacgcaacacaaaggggaagggcttctgcgcccctcccctttgctgtataaagagctatcccagcgcaacaatcccgggaagcgtcgcaaaaccagtacgcaagcctcgttctagcgacacattccggggagagtatcgccgcgcgcggaaaagctacttcgtaactttgggctggaggccggcggacttggccacggcgttgtcttggccgcagaccttgagccagttggccagcagacggtagccgtcctgggtcatcacggattcgggatggaattgcacggcgtacatcggcttgcccttgacacgcacgccctgaataatgtggtcgccttgcgtccacgcggtaaccaccagcgtatccggcaccgaatcgggctcgacggccaacgaatggtagcgggtggcggtcatggggttggccacgccctcgaaaatctcgtcatcgatatgttccaccaagctggtcttgccatgcatgatggtgggcgcatggtccacagtgcagccgtacacctcagcgagcgcctgcaagcccaggcacacaccaaacatcggcacgccgctggccgcgcacaggcgaatcatatcctcactggcaccggattcggccggagcgccagggccgggagaaatcagcacgccatcgtaaccgtccagtacacccggcgcggctgggtcgatagcgtcgttacgcaccacatcaacagtggcgccaagggtttgcagatagcctacgatcgtgtagacgaaggaatcgtagttatccaccaccaaaatatgcgcggaatcggtcatagggctctccttgagggacgtgtactgcaagccatagtactaggatgccgtcagctcgctgccacgaagttcgacatctgctgtaggaatgggatattggcggcggcccaagggaatccccactggaacagcgccgcggcggctgcgaacagcagcagagccagcagcagccatcgaatcggcgccacgccgggctgcagacgcaacagtccgccatagatgctggcatccggacggcgacgctcacccgcgcgaatctcgcgcagcaccggccagcgccatgccaccgcagcggcaatgaacagaaccagccacactaccagcgcgccgaataccaccttgtccagcgagccaatgcgggaagcgatcgagggggtttcggtggtggagaacatcactgcaccggacgaatcagtagtagccagctctttgggcacaccatcggacactttggcccagtacgccaactcaccatagctgatccatcgatgggtgggggtggagtatttcggctcacaggtggtcagtgtgatcatgcgtttggtgggattggcagtggagtcttccggattgggggcgatcacatgcacgtccgtgggcagtacaatctcgtaccgggtgtagtggtagacgtaccagtaatccttggtacgaacgatgatgggatcgccttcctgcaacttgtccacatcgcccaacggctgcccgtagccgttgcggtggccggcgacggcgaagttgccgacctgccccggcatctgggtggtgtcgtaatggcccagaccgtggcgattgagctgctcgagcgtggtgccttccacgatgttgcggtgccattgggagccgaagcgcggaatgtagatctgcgcaaccaagtcgccatatttcgcgtctttcggctgtaccggcgcatcgccctcctgggctttggcgatggtgaccgttcccccgttgttgctggggtcgctccagtcgacggactgggtggtttcgttctgggctcgctccgcctcgacaccggtccaccacatctgccagacgatgtacagggcgcaaatcacggcagcggtaatcagcagttcggcgcagatgccgagtgcctgccaggccgggctccgctggggcgaagacgcgccgcgtactgcggcacgacgggaccttgccctactggcgttggccgggtctgccgccattcgtgcggcatcgtcctcggggaagggctgtacgtccgacacggacgcgagatcaatgggcgccggtacgccgctgttgtgcctgccgtgtctcattgctgagtctgctcctcatctgtggtctttgacgtatcgaccgtggcatatttcaactgctgcagcaaggcggcggtagcggggaactgaaggtcctcggcattctccaccttgtagccaatgccaaacgcggtcacatattgcttaagaatggtaatggcttcggagtcgttcaacgctgcgcgaagtctttgagggtcaccaatcgcggaaatggtgaacggcggcgagtatttcttaccgtgcaacgacagcacgttgccggaacagatgaccgccgaattgaacagcacccgctgatccataatcatcagcgcatcggcaccgccggcccacaaggcattcaccaccgattcgacgtcctgctggtggatcacgtaatcgttgatattggcggtcgtgccgttgttgttgactgcgttctcccacaacggagaatcatccagcgttaccgttacgccgctgccgctgagcgcgggcagcatcaggctggaatccacattgctggagtccttgccttggttctgtgtgctgtcggtgccatcggtgccatcggccttgagcgcgtccgtaagattggcgacctgttcggtcagatcgctgacgtcctgctgcagctggttgacctcgtccacgccttgctccaccagatcagccgtatcgttggtgacggcaaccgtacgattgaccctcacgttggtgctcagcagaaaaccggtcaaggcaatgacgacgaataccgcgacaccaccccatagggagtgccgtgcaccgtgcttacctacatgtctggccatgaatttcctgtcttcttgccgactctggtcgccgctttcgagtgtagccactattatgacttttagcctattgaatggagactatgctgatggctgacgaagagctgcacgaaaccgactcgaacaaccagaaggactggcagagcgagacctcatccagcaccgttgctgacgagaccgccaacaaagacaccgagcagaacgcagagaacgcttctgccgaggaagacgcggcttacggcgtgaatatggagcaggtgcaggccgcgctcaacgccactgccgataaggccacgctgaccccgcagatgcagcgtatgatgaaccgccaggcggagaacaccaagcgcgttgaagaaaccattaagggcaccaagtcgaacccgcgttggttcgtgccgctgttctgcgcgcttatgatcatcggcctgatttggtgcgtggtgtactacctctccccgtccggttcctggccgattccgaacatcggtgcgtggaacctcggcatcggcttcgccctgatcatgatcggattcctgatgacgatgggatggcgctgagttccggctcgttgcgcttatctatcggtagattgttttttctatcgttaggttgtccttaattcttatgagaaaggccgacctcccgtatgcggaggtcggcctttttcgtgccttagcctgttcatccacagctatccaccacttatccacgacttatccactacgttatccacagcctgtggatgaattacacccatgtagttttccaccgaatgtggaaaaccatgtggataagtggtggataagcggcgtttctcggtgtatatctcgtgcataactttggcttggcatacatcgccacagcgagggaacagttatacacccgagttatccactgcaacaaacccaataataccgcggcattcctaacttatccacataagttatccacagtcttatgcacttttctacacacttgtgcacaagtcaccattgtggataactcattatcgtggataactcgtcattgcgcgcatctcattactgtggatatcttcatacggcacacacccactcgccgaacgacgatatccacatcgctaatatccacatcgtcgctttccgcacatacattgatgccgggcactgcatgttccgcaatacccggcatcaatcgtttttttttacagccatatcaagccatatcaagccatatcaagccatatcagtgcagggagccgaaactcatccacccgtaaggattggccatattgcacaacagaatcaacgcaatgaccagcaccaccatggcccagccgtacacctgcatgcgccatttcaggcttttaccgcgccacgccggcacaccacccaccagcagccatgtgagtattccacccactacaaagccgccgacatgcgcctgccacgccacgccaccgaccacgaacggcaaggcgaagttcaccgccatccagatcaacatggagcggatatcggcgccgatacggcgatataccaccagcaatgatgcaaacaggccaaataaggctccagaagccccataggctgccatctgccagccgatgcctcccggagccaccgcagcccacaccataagtcccagggagccgccaaggccggaaatcacatacagtcccaagaaccgccagtggccgatcattcgttccagcactgggcccacggaatacagagcaatcatgttgaacaggatatgcaatagcgagttcggcgcatgcaggaacatcgaggtgatgagcgtccacggctcagccaccagtctgaccggagccgccatgccgaggtacatcaaccaagccctcaggcccggggcaataaatcccaacaatacctccagtagccacactgccacgcacgcaacaatcagcgcccaggtcatcaccggaccaccgcgctcccactggtatcgaatctcccgttgtgtaggaatatgcatgcagcccactgtatcgaaggtctcggatgcgttccacgcgccgcgaagatgccgagccggccaagggcagacgggcgcggatgaatcgcccacgaatgtcattccacccaatcgtcacaaacagcggcctagaatagggagcagagtcggtctgaatgggcataccgaccagacgatccctagggaaaggagccgtcatggagaacaagtcttctaacggttggaagttcttcgcgctgctgttcggcggattgctcgccgcgcttgttggcctgtacatctacaagcagcagaacccggattacgatccgtgggaggagccgtgggagaacagctcctcgccggtcgacctaggtctgaataaggccgaggatgaggacaagcccgcagccgaagctccggccgaggcctgataccccctctcttctttcaacacaagaaagccccgcaatgatatatcgtcgatcgatatatcattgcggggctttcttgtatgtcttgggcgtctgggagaagtctctcccccagtcagcttcgctgacatccccctcatcagagggggctagaggtagctcagtcagcgtacggtttccgcgaaataaagccctacttcgtgaaaaccgtacactgagtcgcgctcagcgtacgttcttcacgaaatcaaggttcatttcgtgaaaaccgtacgctgagttggagtaagcgtgcggttttcacgaagtcaaggctgatttcgtgaaaaccgcacgctagcaactcgctcactcagtcagccagaggagcagtgtgccagatacgttccaaatagtcttccatggagcggtcggagctgaagtagccggagttggccacgttgagcagggccttgcggttccattcgagctcatcagcgtagagggcctcgatctcggactggatgtccatgtaggcggagaagtcggccaaggtcatgaaccagtccttggtcagccagtcggccacgagcggggagtaggcgttgcggtcgccgttggagaaggtgccgtcggccaccatatcgatggcgtgcttcaggcgcgggtcggcctcgtagtaggaggcgggattgtagccctcggcgtacttcttctcgacctcgtcgacggtcatgccgaacaggaagaagttctcggcgccgacgcgctcacggatctcgacgttcgcgccatcgagcgtaccgacggtcatcgcgccgttgagggcgaacttcatgttgccggtacccgaggcctccttgccggcctgcgagatctgctcgtcgaggtcggtggcgggaatcaggtgctgggcgaggcgcacattgtagttccacgggaagtacacggccagcttgcccttgacgtccggatcgttgttgaccacgcgggagacgttgttgatgagctggatggtcatcttggccaggtagtagcccggggcggccttggcaccgaagaacacggtgcgcggggtgacgtcctcggccttgaccttgccggacttgatgtcggcgtaggtggagatgacggacaggatcttcagggactggcgcttgtactcgtgcagacgcttaaccatggtgttgaacatggtgttcgggtcgagctcgaagccgtactcgcgcttggcgtaggcggcgaagtcgaccttgttggccttcttgacggcggcgaacttcttgacgaattcatcgtccttggccagcggctcgaggcccttgagcatctccaggtcggagagccacttgtcggtgccgaggccctcggtgatgaggtcggacaggcgcgggttggcgagcttgacgaagcgacgcggagtcacgccgttggtcacgttggtgaacttgtccgggtagacgtcggagaagttcttgagggtgacgtccttcaggagctgggagtgcagctcggccacgccgttgacgtgggagccgccgtaggtggccaagtaggccatgcgcacggcgtcgccagtgtagatggccatgtccttgatggtgttcttgtcgacgcccttggacttgagctcgtcctcgaactgcgcgttgatcttctcgatgatctcaaggtgacgcggcagcagctcgccgatcaggctggccggccagacctcaagggcctccggcagcagggtgtggcaggtgtagttgaaggtcttggtggtgatggaccacgcggtatcccagtcgtagccgtactcatcgatgaggatgcgcatgagctcggggatgccgatcaccgggtgggtgtcgttgagctggaagacgatcttgttcgggaaagtcgtcagatccggcttgtcctggcccgggtagaagacgcggatggcgtcgtgcagggaggcggagacgaagaagtactgctgctcaaggcgcagttccttgccgaccttggtggagtcttccgggtagagaatcttggagatgttctcggccttgacctgcggggtcacggcttccatgtactcggagcggttgaaggcgagcagatcgaactcgtcgtagctcttggcgctccacaggcgcagggtgttcacgcggccggacttgtagccggggaccaggtagtccaccggcacggcgcgcacggaccatgcgggctgccaggtcttggtgccgtcggcgttctcgacgaccttgccgccgaaggaaaccttctggtcgcggttgtagtcgatgtggccccacggctcttcgttggccagccagtagtccggggtttcgacctgcttgccgtccttgtcgaactcctgcttgaagatgccgtacttgtactggatgccgtagccgaaggccggcacgcccagcgaggcgagggagtcgatgaagcaggcggccagacggccgaggccgccgttgccgaggcccggctcgtattcggcgtcgacgacgtcctggaccttgaagccgagggcttccacggccttgtcgaactgctcggtcagaccggcgttgagcagcgcgttgcgcagctgcttacccatcaggaattctgcggacaggtagccgacggccttggtgttgccgttcacggtgtcggcctgggtcttgaaccaggagtcggcaaggtggttgcgcacggccttggatgcggcgacatacacgtcagcaggggtagcctgctcggtggtgacgttctgagtgtatttcagttgttcacgaatctcgtcggcgaattgttccgccgtgacaggagacttcggtgcggtgatttcggtcattctgactttccttccgggataagtgcccgtgtttattatgccgcgcgataggtatcgtcgcacaaacgtaagcatgaactctccgtaacgacgatggcggagcgttcttgcatacgttctcatttagagcgtagcacatgccccgatattccgcatcacaccgtatgccatcgtttgcattatggaagatcttccggctccggtgccatgatgggatacatggcagtaattcttgaaaaagacctgaaacgcgggcatgacgcgctggtgcaatggcgtgccgcggcccgggagctggcggacaacacaccacatcgtctgaccgtctcccctgtcttgccacgcccggtgtgggcgatggccgtgcgctactcgctgtttctgctggagcggcgcgcacccggccctggcgtggaggtgcgtgtcgcgccgtggggggcggtcaaaatcttggacggcccggaatcggacccgcataacctgaccccgccggacgtcatcgagctggacccggaagtctggctgcggctggcctgcggcatcaccacatgggcagaggaaaaggacgccggccacatcagcgcggtcggcgagcgcgacgacctgagcgacctgctgccgctgtgaggcgcgaagcgtaagtaagccaccagcggcggcaccatcagccataaccacaaatccccttgtgctcaaccaagcacaaggggattattacgagaagaccggcgttcagctcttcttgggcttgagcgcggaaggcatgggcatcggaatcggcttgcgcggggccggcttcggtgcggcaggcgcggaggccgggaactcgccgctggtcgcctttgcggcggcttcggcagcccacttggcgtactcgtcgaggtcatcctcctgcgtagcgggagctgcctcggcggcaccggaagcgtggtcatcagcagcggaatccacatccttgtccgcatactggtcatcgatgtcggcgaacgggtcaggagagcccattcccggctcctgctcgctcagctcttttgccagctcatcgtagtcggtatcggtggtcaggtacttgagctttcgggcaattttctgctgttttgctttttgacgtccgcggcccatctgaccccctgcgattactgtgctgttcgattcatcaacaatagagagtaccactaatagtggcttgttcgttgtcggctcacacttttaccataaaaagcgtttatttagggcatattcaaaggattttcgcatgaccgacgagcagcaactgacagcggcaggcaatgagatgagcgcgagcttcctcgcggccaaaaagcgttcggacgaaacgctcgccaagctggaggccaagccgtcgtccttcaccatgttgaccggcgaccgcccgaccggccggctgcacctcggccactacttcggctcgatccgtgagcgtgtcgccatgcaggagcgcggcgtcaacacgaacatcatcatcgccgactaccaggtgatcaccgaccgcgacaccaccgagcacatccaagacaacgtgctgaacctggtgctcgactacatggccgccggcatcgatccgaacaagaccatgatgttcacccactccgccgtgccggccgagaaccagctactgctgccgttcctgtccttggtcaccgaggccgagctgcaccgcaacccgaccgtgaagtccgagatggaggcgtccggccacgcgctgaccggtctgctgctcacctacccggtgcatcaggcgtgcgacatcctcttctgcaaggccaatgtcgtgccgatcggcaaggacaacctgccgcacgtggaaatcacgcgcaccatcgcccgccgtttcaacgagcgttacgccaagaagaacccggtgttcccggagccggccgccattctgtctgaggcaccggagattccgggtctcgacggccgcaagatgagcaagtcgtacggcaactccatcatgctgggcgccaccgccgaggaaaccgccaagctcatcaagaagagcccgaccgattccgagcgccgcatcaccttcgacccggttgcccgcccgcaggtctccgccctgctgaccaccgccggcctggtgaccggccgcgacccgaaggacatcgccgaggagatcggtgattccggcgccggcgcgctcaaggcatacgtcatcgaatcagtcaacgagttcctggccccgcaccgcgagcgccgcgccgagctggccaaggacatggattccattcgtgacatcctgcacgacggcaacaagcgcgccaacgccatcgccgaggagaccctcgaccaggtgcgcgaggccatgggcatgaagtactgattttcccgccgctcgtagcaagacgccgtgtcagccccaactgggcaactgacacggcgtttttgtattgcgacgtctgctgtgtcctatcttcacttcgaggggcggatttcttgtttttccgtgcaacgcggctatcaagacggacctctgttcacttcatgccgatggcttgcatcaatacgtacgctccccgcacagcaatgtcattacgacgtgttgcggcatagcgcgcatggcttccggagtatcggcggcgtatgggtcggcgtccagcaacaccacatcggccgggtcgccggatgcaaggcggtcacggccagtggcggtcgaggctgccagcgaggtatgcacatcgaggcactgctcgggctggaacggctcgcggtcagagctttcggtgccgagcacggcggcggaaatggccagccacgggtccagcggggccacgggcgcatccgagcccatgcgcagcgtggtaccggcgtcgtggagggccctgaacggataagggatgccggccgggttggcccagaaacgggtgatgacgtcgcggtcatccatggcgtgctgcggctggatgctggccgtgagccccagctcggcgaaacgcgggatatcgacgggtttgagcatctgcgcatgctcgatcgatccatgtgcgtgcgtggcggcgactgcgttgagcgcaatggtgttcgcttcgtcgccaatggcgtggcaggcaatgtcgaagccatgctcggtggctaggcgcatatagtcttcgatttgctgcggcgtgtagctcagcgtgccatacgtcagcggctcgatgcccgaatacggcgtggagcagtaggcggagcgggtgttgagcgatccgtccgagatgagcttcatggcgcccacatggccaagcccggcgctgcccggcaattccttgccggtatgccaacccgcgtcaatggcggctcgcaaccgctcggggtatacaccggcgtccacgcgcaaaccgttaatgccggccgcgaaacgattgatccatgtatcgatgttttcggccatttcataatcgcggatgcccaccacgcccttgcttgcggcgtcctgttcggcctcgcgcagcagacggtcagtctcttcagcagcgcccggcgccttgtcgaaggcggtgtaggcgttgaaccattcgagttcaccgaccagaccggattcgtccacatgtacgccaagcctgcgggccgcggcggaattcacccatccgcagtgcatgtccgcgctggagagggccaccggctgttcgccggtcacggcgtcaattgcggccagtgtgggctgctcgtcgtcggcccacagcgagtgacggaatcgcatgcccaccacgaaggcatctgggtcaagcgtgtcggcggcgcggcgctcatccagatgacggcgcaacatgtccatcgcttcggcggcggaacgggcattgatgaggtccagtcggcccagcgtcttaacccattgcgtgaagtgcgtgtggcagtcccacaggccgggaataacccacaggccgtcggcgtcgatggtggtttcgtcggcgggtgcggaggccgacgttgggattgagacgccgccagaagcaatggcattcgtcgcgtatgccaacgatgtcgtatgcgccttagtctgcatcgtgccgtccgaagccgagaccgttccagcagggccgacagacgcaacaaccccatcgcgaagcaccacatccacgcggtcctgagaccccggaacaccggcattgacaatacgcaccaagctactcatacccgccatcatgccacctttgcatgaacgccatggagattcgttcaagctgaatcgcgccgtcggcgcaggaataataagcccggtagagtcagtccgcaccgtccgcaccgcgctacggtattcaaaacccatttcaaggggctgatctggcctcaatggttcctgccgaaccacaaaaaagccactcctctgccatacgagccgaccgcacagcaggcacgtgtcatttgccgctgcggacctcggactccatggcttccatgggctcgtcgacgagcacggtgccggacggcagggtgccgggcagcggatcgtccatgtagtggtcgaattcgtagagcatgcgcttgttcggcttggcggtcagcaacgaaaccaccacgatgaacagcagcgaaatgatgaacgccggcagcagctcatagatggcgaatacgccgcccaagggcttgacgaggttgtgccagatcagcacggccgccgtgccggacagcatgccggccacggcgccggccttgttggcgcgacgccagtatagcgagcacagcatcaacgggccgaatgaggcaccaagcccggcccacgcgtaagacaccacctggaagatcgacgagttctggtcgtatgccaccagaatgccgaacaggaacatgaccaccagcgtgaccctggccacaatcatgacctgcttgtcggtggccttgcggtgcagcagcccgcggaagatgttctcgcccatggccgaagcgccgatgatcagatacgaggagctggagctcatcgaggccgcgaaaatgccggagaccaccacgccgcacatgaagctcggcagcagggtctgcgccagcacgatgaagatggtttccgcatcggtggaggtcagcagttcggtgggcatcatcgcacgccccaccaagccgatgcacactgcgcaacccagcgaaatcacgcaccaggaggtggcgatgattcgggacttgcgcacttcttccacgctgcggatggacaggaagcgcaccagcacctgcggcataccgaagtaacccaggccccacgccagcatggagatgatggtgatgatgccgtagtcggagggcgcgccgaacacggccttgcccgcctcgacgagctgctggccggtggccgggtccagcttgggcgcggccacctgcgtgccggacaggtagccggggatggcacgcaggaattccacggtgttgtcgacaccgcccgcgctggccacggtgccgatgaacaccaccgcgagcgcgaagaacatgagcatgccttgaatgaagtcggtcatcaccaccgacaagtagccgcccaccacggtgtagacgaacacgaccaccgcgccgatgatcatcatgacgtggtagtcgaaaccgaacaacgtggcgaacagcttgcccacggtcacgaagcagctgcccacgtacacgctgaagaacaccaggatgatcacggccgcgatggtggagatcacgcccttcttgtcatggaaacgcttggcgaagaagtcaggaatggtgatggcatcgtcggtcactaccgagtagcggcgcagtcgccgggccacaagcttccagttgagataggtgccgagcgccagtccgacggcggtccacatcgggtcggccgcaccagtgaagtaggccaggcccggcaggcccatcagcagccagccgctcatgtcggaggcttcggcgctcagggccgtgagccacggccccacgccgcgcccgcccgcaaagtattccttggaggaggagttggagcgtttggagtagatgaatccgatggacagcatggccgcaaaatagatgaccatggccagcagaatccagaaatcgttggccaactgcgcccctcctcaatcatgacgccaagcggctaccgccatggcagaactatgtgctgatatgcgattgacgccggagcggcgtcatacagaccgtcacagccgtgaatacggccgcaacgcacttcgcctgatggtagtggatacaagggctcaagcaccttccaccgtttccatactgagacgctgttttatccgagctcccctcacctgaggggagccaagatgacggtcagatgtcgtagcgccaggacttgtcggtcaccacgcgggccatcgccaaaccgatcggcagacagataatcaccatgaacgcacggaacgcccagtccagcgcattcatggtctggaagctgccgaggtaccacatggcacggtacatatacagaccgggcaccatgatcacgatcgacggcacggtcaggcagatgcgcgggtagccgaggtgcggcggtagccagccacgtcgcacggatgaacgccacgccgatgccagaatgcccgccaggaacgcgccgatgaaggtagccatctcgggtgccacgttgaagtcttgcaattccaagcgcagcgtgtccgtgatcgcaccgatcagggcggcggtcaggcacatgcgctgcggcgaattgaacagcacggagaagccccacacgccgacgaacgccgccacgaatcgcagcaatccgttgacccacgggtcaagccccagtggctcaaagccttccgggtgcaggtgcaccatcacggccacggcccagcctgccagcgtggccatcaggatgatgcacagcacgtacgccacgcgctggatgcccgaggggaagtcgattttcgccatgtcgagtccgcctgtgatgagcgggaaaccggggatcacgaacagcatggcgccgatgtaggccgtatcgtgcgagagcgcgactgggtcgaaaatgccgatgagtcgcagggtgccggtgcaggcgagcgccgccgcggccacacacacaaaggtgacgaagaactggttcagatggtatgcaaacagccggcgacgcatccactggccaaggcccgcgcccacgaacgcaccgatcatgtcgtatgggccgccgccgagcaggaacacgaaggccgcgcaggctagggcggaggccagaccggagaaccacggcttgtacagcggcttgcggcgctcaatcagatcgagtcgctcgtgcgcctgccgcacggtgataccgcccttggccttctcttcgtcggagcgctcgttgaagtgttcggcgtattccttgggcacgcgattcttacgcttcgtactgcttgcagcagggctttcggcggttgcgccgttcgccgcgttcgccgattcaaccgactcattggagtcaccggtaaacacttcggcatcgtcgtaggccttctcttcggccgctttgtcttcgaccggagtgacttccgcgctgtccgccaaaagtcggtgggcttcttcattgtcatcgtccaaggacttggccacggaggtcacgagtaccttggttttcgacgcaagatccagcgcctcgtccacgctgccgttggccgcctcagcctcgaccttggcacgttcgcgcaggcgcttggccagatcggccgaatactgcgaagcgtcacgttcgtccaaatgcttgaccacgccatcggacagttgcgaatcgacgtgatacatcgaccccttgccgagattcacggagaaccagtcggcgaaatgttccagcagccagatacgttcggtgttcacgccggtactcggcaaatccacgacttcggtgatgcggttacgaccatccgtgcaggtggcctcgatatccgtcaggttcacgtcggcgcgtacgtgcacgcccagcgggtaggcgatgcggtgcatcatttcacgcacgcggaaggagccggtgccggctcccaggtccaacatgccgactcgtacaatcacgctggctttggcggcgataccggcgtccaccaccggtttttcccaatcgcgtgcaatatcttccatgtccagcggaatggagtgggtgtggaatttacgtacagccgttgcgcctttcgcttcgggcgcactttttttcttctgttcgctcacatccttcattactactccctgccttccccgccagcaatcgtaaggcgctcaaatcttccgcgaatcggacagtgtctcatatgctgtccgatattcggtctctatatgtggacaacttggcgcactatatggacttcgtaacgtaaatagcgatttcgcggggatacactattgcccacacaacaaccacgttgaatatgggctgtgggctcgcaacgactggtctcaacaactgcggaggagccgcagacgaccagtagaccgagcaacctgttattcggcaaaggaggttatatggcaacacctgaagaacagatcactcccgctgacgccgccatcgtcactaccgggaccggccgaaagggcccggaggagcatgatcttcccgaaagcctgaagtacgacatggatctgtgtcttgagatcctgcgtaacgtactgggcgaatacaaccccgaactgctgtctacgttcgacaccgtgcgtcattacgcggtggaggccagcgccgagcatttcgccgagctgaaggatccgaaccccgaccaggatggtctgaaggaggccgtgaacgtcatcgacaacatgacgttgcacgacgcccagctgctggcccgcgcattcgccacgtatttccatctggcaaacctgtccgaggagaactaccgtgtttccgtgctccacgagcgcgagaacaacgtgtccgttgaccaggcggtcgacccgatcaacgagctcaccgtcgcctaccaccagctcatcaatgagactggcccggccaaggccaaggaactgctcaaccagctcgaattccaccccgtcttcacggcgcaccccactgaggcccgtcgtaaggccgtggaaggcaagatccgccgcgtttccgaattgcttgaggagtacaagcgcctcggcggctcggataagaaggaatgcctgcgccgtctctacaacgagatcgacgccctgttccgcacctctccgatcgcgctgaagaagccgaccccggttgaggaagcggacacgattctcgacatcttcgacaacacgctgttcaacaccatccccaaggtctaccgtcgcttcgacgactgggtcctgggcgataaggccggtctcgtcgagcccgcttgccccgcgttcttccacccgggcagctggatcggctccgaccgcgacggtaacccgaacgtcaccgccaaggtgagccgcgccgtggcccgcaagttctccgatcacgtgatcgccgcccttgagcaagccacccgcaccgtgggccgcaacctcacgatggaagccgagaccacgccgccgagcgccgagctcaagagcctctggagccaccagaaggaaatgagcgagcgtctgaccgacaaggccgccctgatctccaccaaggagatgcaccgcgcggtcatgctggtgatggccgaccgtctgcactacaccatcgagcgcgacgccgacctcatgtaccactcctgcgacgacttcctcgccgacctcaaggtggtccagcgttcgctggccgccgccggtgccaagcgttccgcttacggcccgctgcaggatctgatctggcagaccgagaccttcggcttccacatggtggagatggagttccgtcagcactccgtggtgcacgcccgcgcccttgcggatatccgcgagcacggcctgcacggcgagcgcggcgaactgcagccgatgacgcacgaggtgctcgacaccttccgcgccctcggtgccatccagaagcgcaacggcctcaaggccgcccgccgctacatcatctccttcaccaagagtgcccagaacatcaaggatgtctacgagctcaaccgcttggccttctcccacccggaggacgtgcccaccatcgacgtgatcccgctgttcgagcagcttgaggatctgcagaactcggtggacgtgctcgaggaaatgatcaagatccccgaggttcaggctcgtctgaaggccaccggcaacaagctcgaggtcatgctcggttactccgactcctcgaaggacgccggcccgacctccgccacgctggccctgcactccgctcaggagcgcattgccaagtgggctgagtcgcacgacatcgatctgaccctgttccatggccgtggcggcgccgtaggtcgtggcggcggccccgccaaccgtgcggtgctcgcccagccggtcggttccgtcaagtgccgcttcaagctcaccgagcagggcgaggtcatcttcgcccgttacggcaacccggtgctggccatccgccacgtcgagtccgtggctgcggcgaccttgctgcagtccgcgccgagcgtggagaagcgcaacaccgagatgaccgagaagtatgccgacatggccgctcagctcgacgaggccgcgcacaaccgcttcctcgacctgttgaacaccgacggctttgccccgtggttctcgatcgttacgccgctgaccgaaatcggcctgctgccgatcggctcccgcccggccaagcgtggcctcggcgccaagtcgctcgacgacctgcgtacgattccgtggatcttctcctgggcccaggcccgcatcaacctggccgcctggtacggtctcggcaccgcatgcgagaagttcggcgatctggagaccatgcgtcaggcttacgaggaatggccgctgttctccacgttcatcgacaacatcgagatgtccatcgccaagacggatgagcgcatcgccaggatgtaccttgccctcggcgaccgcgaggacctcaatgagaaggtgctcaacgagatggagctcacccgcaagtgggttctggccatcgtgggtgacaagtggccgctgcagcaccgtcacgtgctcggccaggccatccgcatccgctccccatacgtggacgcgctgtccgtcacccaggtgctggcgctcaagtcgctgcgcaagaaggtggacaaggaagagctctcgcaaagccaacaggcaggattcatctatctgatcctctgcaccgtttcaggtgttgctgccggcctgcagaacacgggctgattcccggccgaccgatcgggaaaagcgagcggggaggttccgtgccgattgacggcgcgggcctccccgctcgcgtcatccggccctagactggccggcgacggcgcacgcctggcgggcgcgcagagaacggacgcgcggaacgggcacctcgacagatcggaggggacatgggcaagccagcggacgggcgcgggaacaccgggtccacggacggcatcaggacggggggcgacgccgggaacgaacgccacgcttgcaaagcgaatccggctacaaccgatggcattgggaaaaaacatggcctggaagatacgtcagaaaatttttccggcaagaaatatgctttggcaccgaaagcagctaccaaattccttaaggcgagtagatgctatgtggctttgggcaaggccagacgcgtgctatggtggctgggattactgctgctttcaccagcacttattttgtgggcggaatggggcgccaatggcgatgatgatactataatctgcagagtcttaacgttctcttcctcttcgtgcatgaatttaactacggcaactgagtatgtacgtagacttaccttagtattgattatgggggtagtctgctggattgcggcgcttgtcatctttggcgtgcgttcatatatgcgatctgtatatccggaacttcgtgatcattcctcttccgcctcgcatgtccttgtgggaatcatatcgtttctcgtgctggtcatggtctttcccgttcttgtgataacgctactttccgctctaatgactctatgacgttttaccagaggcgcattgcgtggaatggctgaatcattccacgcaatgcgatcacaatcatgattgattaacggttcggattttcaagagattcagcataggataatgccaatataccagcctccgcttgactcgggagtcggtctgcatgtgacgcaatgagcagtgcttttttacttccggatacgttatcgaatattccaagatcgattccatcaacaagctttcgaaatgcgatgaccaggttgtccgcacttcccttgaaccgggactgatagaaccgtttaattcgattcgtctcgctttgcgcgaacatgtcccgcatagcggtggacaaagacctttcggaagaattgctctgcatggaccgcgccagcaaccatgcatcacagtccgcgagaacatcgctgtaactgaatcccatacgagcgtcttgctcgccgagatgagcgtgcagccatgacgccaggtcctctttcggggtattcgccaggtagcttccccaaatctgcagcaaatccagagcccatccgcccagatcaccgagaccatagtccattggatcgttcgtaacgccccatgtcaagtatcccaaggacgtggcagccatatgggcgatgtcccgattgggcagcgtgcctttgatgacaggctgtgcatcacatgcgacaccgcatgcctgacgcgacaaggccaattcgctgggagtaaccggctccggtgtgtacgcatgccatagtgcctgcgtgccggaactaccttccgaccagtacgtaggtttgcggagccattgcaggatgagttgaccgatgctgtcctcataaaccgccacctgggtacccagagcggcaggggctttgtgacactcctgctcgggtgtcgccgccggcctgcggaacacgggctgatccgcggctgtccgaccgcttgatgaacggggaggttccgtgccgattgacggcgcgggcctccccgttcgcgtcgcacggccctagactggccggcgacggcgcgcacggaacgggcgcgcgggccgagcgacagactcggatgatcggagggggacatatggacgcggaaagggacacggacgggacgacggacgcgcacgagggggaccacacgcccgcggacggtgccgggacggagggcgaaggcggcaagccggacactaggccgggcgacagactcgcgaccatccgacgcacgctgtggtggataggactggcgctacagctcccattcgctttgactctgatccattttgataccccttacctgatattggagcgtatcctatgcgctattccgccaagactggcaagcgacccgtcatcaatcgtcggcattcccgcacttgaaacggaatggtgtcgagaattcctggcactagtcctgggcgcagtttgctgggttacagctggagtaatgagattagttgcggacagcccatcaaaccatggaaaagaaacccttcctgtacgcatcttcgccggaatcatcaccatcatcgtattgatggccaccggtattacaggactcttcctcggcatagcggccttttagaagtttccccgtatctggcagaggaattccaaatcgaaagcacaacagcgaatgtgtgggcagacgacacatctgcccacacataatgcattatgcgagctaccgtcttggctgatcaatgaatgcagcgaacgcccgagcactcacttcagcttcctgcttatcaggaagcttgtctgtaccggcagccttttttaggatgctttcgctcattccaatatttgtcaagaaattacgatgtatctggtctcaaatcctttcaatagacgaaagttgcgcttctctgatccagctgtaaacggcgtatactggcgatattccagtgttttaccggcttattcgtctgaatctggcttccatcgtaggaacagtgacctcatgggaaggcgacggatgaagacaaatggagacgagaaggagactcgcttggccgaaactactgctacctatgctctgggagtcttctgtcagctcgtaagaaaaattgaagcaaaacacgcaaagccaacaggcaggattcatctacctcatcctgtgcaccgtctccggcgtcgctgccggcctgcagaacacaggctgatctacacaccagcgcatatggggaagccccgctcacatcaagcagagcttccccgttttgtgtgcatcttgcatcatcttgcaataattcttacatgtaaacagagagttcttacatgaaagaattattgaaaggtgatgaaagaacttactttcacgcgtaccaatcattccaacacgtatcgggatgacggtccattcccctcgcggcgcaacttgcccgcatcctctagcttcttcaacacccggtatgcactgatatagctcaggccaaacaaatccatgacatccgccgtagtgacgacaccatcatttttttcggcgaactccagaacaaggccactgcgccgggtggcatcgatgtcacgctggcgcacgtaagacgccagcccctctgaacgtttgtacactcgggcactcagcatatacgaacgagagctcccgctaccgaccccctccaccaaaccagcttccaccagattctcaacagcggacacgatgcgtcgatgctccaaatgagaaaaatcgcacaattggaccacggtaagcctacgatgctcacgcagcagcgagagcacaatcagtgaccagaccggcaatggagccccacgtcgacgttcctcgtcgccaatcatggttacgaatgcctcgtcaggtaccacgcggcgcaagaacaagataacttcctcagcactggactgtgaataatccgggaaagaaccgcctgccgcaatcgacccggcatagatggtatccacgcctcgtccggtgcgttcaacatatccggcagctttcagaatcagggcaagctgcggattgcgggaacgcggttgtgcagtaagcaggttatcttcggaaacaccctctatgaatcctccggggttggctatggtcaacccatcatcatcaaccaggaacctcaccgaacccattcgtgcataatcgcgatggcagaaagcgttaatcattgcctcacggaatgcccctcgatcgaagtctggcagatcgacccgaatcaagccgctcatgacttcgtggctgggattccacggctccatcagctcgcctacacgatcaaacatatccaccaagggcaacacgaacggatccatattgacctttggagacatgcctttcatcacttgaaaaacagccgatgcggctggaaccgatcgatgaatagcatcaaccgaaccaatggtgagcagaccagcaacagatggctgcaatccatacgggccatcaacaaccagctcaagtgcccgatcgaaatcctcatcagtaaaagacaacaacgagttttgcgcattggcactgcgaatatggcttctcaacttgttccgtgagtctggattcaaatcgtccaaccgagcctctggggcaggttgcgcactgaaatcgtagaaccgttgctgagataaacggctaatgaattgggaaacaaacagcggaacgacctcaggcgagccgtctgctttcagccggcgctgcaatgtcttcccctgactggtagatacgatttgctgactgttatccacctcaatactgactatcggcacctcgttctcatacaagagcgccacgcgagcgggaagctgcggaacagtcttattgaaaattagtaccgcaagtccattgatattgcgatgctcgtcacatacgccggtcacagtgccatcgtcttcaataccgagatacagtgtgccgccttcggtattggctagagccactacgttgtcaacaatttcatcatgcgattgagggcgcttctgctcactcttgaactcaaccgtcaaactttctttggccggcaacatgagcatcccctttcaccatcttgcaataattcttacatgttaacagagagttcttacatgtaagaattattgcaagatggtgaaaggggtaaagagcaatccatcctgtcatctccagcaacttaaatccgatcatcgctgctttcggcatatctgatatcagccgctggtgccagtccaatcacccaattgaagctcaacacggccaaagactctacgccgcagtggattcgcgctcgatgagcttatagcccacgttcacggtctgcgggaagaattcatcgtccgggttctcgatacgccgcataagcaaggtcagcgcggtatccgccatgcccttgaaatccgtggccacggtggtcagcattggcacgctgtacgcaccctggctcaggccgtcgaagccgataacgcgcacatcgcccggcacgctcacgccatcatccgccagaccacgcagaataccgagcgcaataccgtcgttcaggcagtacagaccgtcgtacttgcacttgcctttcttagccaagccgcgcccggcctcgataccgccgtcaatcgaccacgaggatttgatgaaatcacggcgctcgtcaaacggcagtccggccgcgagaatcgtctccttggcggcccgcatacgaatatcacgcgagccgggaatgatgttgggattgttgggatcgtgattgtcgccgacgatgccgatgcgcgtacagccacgcgcgataaggtgttcgattgccgcccgtgagccggcgtcgctcggcgcgttcacggtgtcgacgggcaggctggtgtcgtagttttccagcatgacggccgggtgccgcttcaggatatcgaccgcacgtggcgcattgatggcgatgatgccgtccgaaaacgtgtacgacagatcgttgtcgtcggtaagataccgggacagttcgatgagcatgtgcgagtcgcgcttgtgcacttcctcagccacacacatggccagatgggagaaatagtcgccctcgaggcccgaggtaaggaaggtgatggtatcggaccgcccagaacgcagggaccggccagacaggttgattttatagccgagtttgcgggcggcgtcacgcacgcgttgcgtggtttcgggcttgacgtaatccttgcctcgcagggccgcggaggcggtggtggcggtcactccggccagttcgccgacatcctttaaggtcaccatcgttaccatctccgcatatcacgaaccttatcgataagaatccatagtaccgcccacatctcagccgaggatgagaccctcggtcgaggccctgcccggcgactcgaacgccgcggtcaccgtggtgagcaccgacgctgcaaacgaaaacatgtcaaaccaagaaatggacatgacggagtcattgttttccgagagggatatgccgcgtccacgggcagacgtcacgtatcaatcacgccgataccgtcatataactgttttcgatgtgagaaagctcatagcttccgaccacagaaatcagccacagcaaccccataacagcgttatagttctgtttgtcggcgtcgacaagagccagcagcgccgatgaaatgcacaccaaggatgtttagcgaattgttcgcagttcgcacgattcgatttgattcgattcgtgcagcccggatggttcacgggggcatgccgtcgtgaggtgcgtggatatgggcgatgcgactctcgttcgggccggcaggccatcgtacaccagttacgaaaggatccgcccatatatggcaaggtttaccgagaatcgttggaccagcgcgattatccctgcactgctgattcatatcccaatcggtaccgtctattgctggagcgtgttcaagcagcttatcgctgaccgtctccacgccagccccgcctccgtggaatggggcttctcactcgccatcttcttcctcggcatgtccgccgcgtttgccgggccaatggtggagaaaaacatcaagaaatccgcactcgtctccatggtctgcttcgtggtcggcttcgccggcacgggcgtgagcatcgccctgaacttcctgccgggcgtgttcatctgttatggcgcgatcatgggcatcggcctgggcgtcggttatctgactccggtcaagaacctgatgctttggttcgccgacaacaagggcctcgccaccggcatcgccgtcgccggcttcggcctggccaaggccattgccagcccactgatggaatatctcatcggcacggttggcctggtcagcatgttcttcatcctcgccgcggtctacgcggtgatgatgttcgtcggcttcctgctcatcaagcgtccggccggctgggtgtatgatcccgcgacctcacacgtcagccgcaagacaatcctcaagaagcccgtgttctggggcatctggatagccttctatatcaacatcacctgcggcctggccctcatcagccaagagaaggacatcctgcacgatgtgctcagggccttcccgcagtatgccaacctgagccccgccaagtttgccgccgccatctccggcatcatcggactggtgctcgccgtggactccgtgttcaacacggctggccgcgtgggcttctccacactctccgaccacctgaagcgccgcgagaccgtctatcaggtaatcttcatcatgtcgattgccgtgtgcttgctgcagatcttcaccaacagcatcggcaacgctctgctgtgggccgtgctggccatgctgttcctcgtcaacgcgggctatggtggcggtttctcgacgctgcccgtgctgcttgatcagcacttcggcaccaaaaccgtctccaccacgcacggtctgacgctgagcgcctgggcgttcgccggtctgtccggcaaccagttggcctcgttcgtagttgcccacgcgcctgatcaggcccaccgctacgccgcgctgattccggtaatcaccggcctgttcgtcgtggccctgatcagcatcagcttggtcaagtacctcggcgacagaaacgtcacgaaggccgtcgaagaccgaggctgagctgccgcaaaacaacgattctgccggagtcgggcgcatcgatcgcatcaatcgatgtacgtcacgattttggcagaatcgttgttgttgctgttgagtacctgaggtcgtgcggcttacgcgccgaccagttcgagcatttgggggatgctctttttgccgaattcgacttgctgggtgccgtcggcgtgggtgatgacgatgcagggcacgctcatcgcgccgtactggtccttaagttcggggaagtgcgagacgtcgtaggcttcggcgcgcacggccgggctcagggaggcaatgcgctgggaagcaagcacggtttccgggcacatcgtgcaggtgagcgagacgaggatcatgatgttcagcgggtccgtgatggacttcgcgcgttcgaccaggtcatcgcccagcggctggccgggaccggccgcgttgtacaggccaagcacgaacgagttgaactcgtggccggaaggtacgccgtggaaggccagaccggtgaagaccagtgaaccattgccgtccttgccggccttgccgtcgccctcagccggcacgcagatgcgcacagttgggcgggcgagcggcaggacgccggcgacgtcgaatgtggcgcggccggaatcgtccaacgaaccataagtgggcagttcggtgccgtccggcaaggtgacggacagcggttcgccgaccaccaaagaagtaggcacagaagcaccatccaccgccgtgatcagccctgcggcatcaacggcaaccgagttcagcttgccgccggacagcgcaaccatctcgccgatgaaaccctgcaattccgccgaaagcggagtgccgtccagttcgagagcgagcgtgaccgggcgggtcatgcgtccgaagaccacgccaagctgctgcttgacggcggcggagaacagttcgccgggcttcttggcggcgctggctgcggctgcggcatcggcgctgcgtttggcgggagccggggcgggcgtcgtgccagcggccgaggcggcggaggcggccttggcctcggactcctcataagcggaagcagtgggacgcggcggcaccaagccggttttctcgctcatctgcttggcgtaacgctccagttccacggcggcaatcgcaccgtcggcggtggcggtgaccacctggcgcaggttcttgacgcgcagatcgccggccgcgtacacgcccggcaccgaagttctgaggtagtcgtgcgtgaccacgtaaccgtggtcgtcgagctccaccacgccgcgcaccaaatcggtggcgggcacatagccggcgaacacgaagacgccgaaggtgccggcgtcggcgggcttccacgtttcggtctggccggtggcaaggttcaggattgaggcttctcgcaggcctccttggccggcggtgacgcccttcagctcgacctgataacgcacgtcgatcttcgggttgttcttggcttcggcggccactgcggcatcgcaggtgaagtccggttcgcgcacgagcacggtgactttggaggcgtatttggtcaggaacacggattcctcggctgcggcgaatccgccgccgaccaccagtacttccttgccggtgaagaactcgccgtcgcaggtggcgcagtaggccacgccgcggccggcgtactcggcctcgccctcgaagcccagcttgcgcgggctggcgccggtggcgatgaggatgccgaaggtcttgaggtcgccgcgtgaggtgtgcacggttttgatgtcaccatccacgtcgagaccggtggcttcggcggagaggaattcggcaccaaagtcctgagcctgctgacgcatggtctgggtgagcgcgcggcccgtggtgcggcccacgcccggatagttgacgacttcgttggtgatggtgatctggccgccgaaatcatctttttcaagaatcagcacacggtagcgagcgcgggccaagtacaggccggccgtcaggccagccggcccgccaccaatgacgacgacgtcatagagattgttggtctgagtcatgaaaactcccttacatacactggctcccctctctgaggggagctgtcgtagtgagactgaggggagcatatcggatcaggctagctctcgcgagcactccccccagtcgctttcagcgacagctcccctcagaaaggggggccaagattaccgcctattcagtgtcgatcacagctggccgacgaggtcgaggctgggctcgatggtttcctcgccaggggtccagttggcggggcagacctggtcgccgtgctcgtagacgaactgggaggcctgcacgcggcgcagcagctcctcggcgttgcggcccacgttggaggagatgacctcgtaggccacgaccttgccctccgggctcacgatgaagtcgccacgctcagccacgccatcggcctcgttgtaggtgtcgagatccttggccagcagggcggtcgggtcggcaagcatcgggtactcgatcttggcgatcttctcgttggcgtcgtgccaagccttgtgcacgaagtgggtgtcgcaggagacggagtagatctcgcaaccgatttccttgaacttggcgtagttctcggccaggtcttcaagctcggtggggcacacgaaggtgaagtcggccgggtagaagaagaacagggaccagtggccgagcacatcgtccttggtcacttcgtggaactcattgttctggaatgcgttcaccttgaaatcggtcagttcatgctgcagaagagtcatcatcggtcctttcgggaattgttaatcttcaagcgtttaccaccacctatcgtaatgtggtgagccacggctcgcgcgggtgtaacgtatgagccttatcacaccacccgcaacccttgtgcccaaatggccgttgccccaatcacgactatgcgcgaatactcgctaatatggcaatcagcagcccgctgataatggaggtttcatggctcagtcagactttgaacaggaatcgaccgcaaacgcaacgtggagtcgcatgctgcaaggcaaccggcgctttgccgagggcaagcccgaccatccatggcaggatcaggagacccgtcaaacgttgcttgatggccagaacccggatgccgcggtgctctcctgctcggactcgcgcgtacctccggaaatcatttttgatcagggcctgggcgacctgttcaccgtgcgcaccgccgggcaactcatcgatagcgcggttatcgcctcgctggagtacgcggtcaagaaactgcacgtcagcctgatctgtgtgctcggtcacgagcactgcggcgcaatcgaggccgccgagcaggagctggacgacctgatgcacaccatcacttccgaagccgacggctcactggaggccgcggatgcgatggacggcctcgacgagcacatcgccgccgccgaatcgattattctgcgccaggccggcatgtccgtctggcaggcgcgcgaagccgagctcgacgcgcatgaagatatcgagcgcgtgcatgtggcccacattattgaaactttggtggagcagtctcctgtcatccagcaggccctcgccgctgacaagctcatgatcgtcggcgcccgctatcagctcgattccggcaaagtagaagtgctgagcttctgagcgtgcgatccgcaacatcgccaacctgcgtgggatttggcgaatccttggccatagccgcgagaaacagcctctctgcactagtaatgccgtccagcgctggagcgcatacggcatcgtcgaaggcgagcaacgcatcggaaacaccggtcgacacgtcgtccgcggtaatgataagagtgcccttccctttgccgagtttcttactgcccagccagcacaccccaatttgacgtgccactcccctagagttgaagccatgtcacttggtttgaacatcctcctgatttttgtatttctcgttatcggttccgtgttctccggcaccgagttggcattggtctctctgcgcggctcgcagatcgagcaaatggagcaggaggacgctcgcggcgccaaagtcgccaaaatcgcacgtgacccgaacaccttcctgtccaccgtgcagatcggcgtgacgctctccggcttcctgtccgcctcgttcggcgcctcctccatcgccccctacctgattccggcggtcgaaagctggggcgtgcaccccggcatcgccagcggcctggtgaacatcatcctgaccctcatcatctcctactgttccatcgtgatctccgagatggtgcccaagcgcatcgccatgcagcgcaccgagcagatcgcgcgcgccgtggtgcccgccatcgacgccttcgccgccgtctgccgcccgatcatctggctcatcggcaagaacacgaacggcatcgtccgcctgctcggcttcgacccgcagcagaccgagtccgaggtgtccgacgacgagctgcgcgtgctggtcagctccaacaccaacctctccaaggacgaacgcacgattctggacgatgtgttcgacgcgtccgaaaccatcgtcgccgaggtgatgcgcccacgtgccgacgtggtcttcatcgagggcgaccagcccttggccgaggccgccgcgttcgtacgcgaccagccgtactcccgttacccggtgaccggcaaggatttcgacgacgtgatcggcttcgtgcatgtgcgcgatctgctggacgtgcgcgatccgaacgccaagatcgtgcgcgatgtggtgcgcgaaggcatctccctgcccggcacctccaagctgctgccgagcctggaactgctgcgtaagcgcggcatccatctggccgtggtcatcgacgagtacggaggcacggacggcatcgtgacgcttgaggatatgaccgaggagcttgtgggcgatattcgcgatgagtacgatctgcccagcgagaagggcggcgaacgcaccacccgcaccgcgttcgtcaatggtgtggccacgatcgaggccagcatgaccattgaggacttcgccgatctgaccggcatcgaattggaggacggcccgtacgagacggtcgccggctacttcctgtccaagaccggcaagatgggtgcggtgggcgacgtgctgcattccgacgacggctacaacatggtcatcaccaaggtggatggccgccgcatcgaaaccatcgaagtccgcaaagccggtgccccggaccatgcgccactgccagccgaatcacaaagcgacgatgccaactagccacgtgatattcaccacctattcgttcggcccggggcataaccaaaaatcgtagaattatatggacaggttccacctactgaaagaaggaacattatgacacttgcgtttgttgtgccgggccttgatgaagcggccagtgagaaggccatcgccatcctacagaaccgactgagccaggagcaggaggccgctctggtcctgaagcacgcacactggaacgtgaccggcccgaacttcatcgccgttcacgagatgcttgaccccgaggtcgaggccgtgctggcccaggccgacgagaccgccgagcgcattgccactctgggcggcaccccggatggccgtgctgacgccatcgtgcgcaaccgcacgtggaaatcgttcgacgctgagggccgcgtgggcaccgaggagtatctcaaggcgctgatcgagtactacgacgccttcatcgccgacgaccgcaaggccatcgccgagctggacgagctggatgtgatcagctccaacatcatccaggaccacgtgcaggaactcgaaaagttccagtggttcatgcgctctcacctggcataagtaaaagcagtattccgtggctcccctcaaagaggggagccactttcgtctcacgtgaaatagagagtctccacatacataagttggaaaagtgtataaaactccccattttgaggttggaaaacgtagccaaaaccgcattcttatggttggaaaagtgtaaaatatgcgctataaacagttggaaaacgtgcccagcatagatgcaaggcctacaaatgactggagattctcatgctgcgaagaaaaatcgagacacagctggaagcttggagatccgcgccgaaacgcactgcactgctggtcaccggagcccgtcagattggcaaaacctatatcatcaggcactttgcccaacagcattacgaccatatcgccgagctcaatttcatcgagaaccctgacctcgttgcattattcgatcggccccgcgatgccaaaaacctactgatgaggctggaactggccgtaaatacgccattagtacccggcaaaaccctgattttctttgacgaggtccagcgttgcaaggaaatggtcaccgcaattaagttccttgtagatgatggtcggttcgattacgcgctttccggctcgctacttggagtcgagctcgaagatatacgctcggtaccggtcgggtacctgaccgagctggatatgtatccactggatttccaagagttctgctggtcgcagcatatcggcaacgacgtattcgatatgcttgccgaatgctttgccaagcaccaggaagtggatgagttcattcatcaaaggctcatggagctatactccaaatatctggtcatcggcggcatgcctgccgcagtcgactcgttcgtggcaaacggcagcgttgcggacgtgcgcactatacaagagaacataaagcgtgaatatcgccgcgatatcagccaatacgcgcgcaaagaagaccggctgcatatccgcgctatctacgatttggtgcccagcgagttaaataacccaaacaagcgctttaccttcgccaaaatcgaaaagaacatgagattccaatcggttgcttccgatttcgattggctggtcaatgcggatgtagccgtcgccgcgtacaacgtggacgaaccgtgcacaccgttggagatgagcaaggaacgtaacctcttcaaactcttttacaacgacgtgggtctgcttaccggctcgtttctcaagaaaaccgcgctcgacgtactcgacggcaaccctgatatcaactacggttcaatctatgaaaatgcggtggcccaagagctacgcgctcacggatttgacctgtactactacaacagtaagaagcttggcgagctcgatttcctcatccaagaccgcaacgatcacgtgctgccgattgaggtgaagtccggcaaatcctacaaacgccatcgcgcaatggacaacgtgctcgcccaccctgaataccatctcaatacaggctatgtgcttggcccgtgcaacgtctcagtcgaagggaatgtaacctacctgcctgtatacatggccggcatgttccataacgaatgacgggccgcacacttagtcaacaagtacatgtcggtcagatggttcggactggtcagagggcccgctctgatcagttaggtcggtctgaacggactggctgggctggtcggcctgagtagcccgtttggaccgatccggttcgcccttgctggccttcacactgcttcagctccagctgaagttcgctgatgcgccgttcgagttcgtcgatgcgccgcacgtgtggcgaagtgagactaaggggagccgagagatggctcacaggccgagggcaccggccacggccatggcctcgtgttcgggatcggcctggccgatgtgtacgttgacgtgaatttcgtcatcgcccggctcttcgagaatgtcggactgggattgcagcatgctcggcttcatgaagtggccttggcggtgggaaaggcgttccatcacctcgtcgaatgtgccctgcatgtagacgaacaccacgccttgacggcgcagcttgtcgcggtagatcttcttcaacgccgagcaggtgaccacggcgggctcgccggcggccacgcgctcgtcgatccacgcggcgatggtgtcgagccaaggccagcggtcttcgtcggtgagcgggtgtccggcggccatcgagatggtggcgcattcggaccatgcgaacgaatccgatcaggccatcagccacatcgccggcactgaagcctgacccgtcatcgtcacagcaccacgcggcggttgaggtcgcggcgcagcgtcttccagccgggtaggtaggcggtcatgcggcgctggaatccggcaccgtggccgctttcccacaaatgcgtcatctcatggaccaagacgtattccaggaattgcggttccatcagtcccaattgaaggttcagacggatgcggccggttcgcggtgtacacgatccccagcgcgaggtcatgacccgtagcgtgatatgcgtgggctgccggccgacgaccggcccccacttggccagcagctgtggcaacgcggcgttgatcgcggccgccgcttgtcgtttgcgttcgtcggtccagatttgggagcggtcaaaatacggttggacattcgtaccggcttggcctggcccggcgtcaccaattcccggacgactgatatcaccggttttcggacgaccggcaacgcctccatcatggccgctggcaccagctacaccacgacctccgttctcgaagccggcgccctcgttcaatgccatgatggagcgccgttgcgcctcagccatgcgctgctgctgggcgagaatccacgaatgtcgctctttgacgaaatccgcgatacgactctcgctcatccgcatcggtgcggagatttcgacgcggccgctcggcggtttgatgcgcaaatacaggtttttgatgggtttgcgcgtcaggtgcagatggatgccgtcaatgtccaacgactgcccggcggcagcggaccgaacggatttcggcgcaccggacttcggagcggtggattgacgacggcgataaggcatgcaagtcattcttgcacaacggcggacaacaagcggcacacaatgccgcccctcacgaatcggcaaccgccccttacccccacgcgcacgccctgtccgactatgtgagatcccgtatcacgaatcgcgaggaaccgtactacgtgctgctggacgaggtgcagtacgcgatctcggacgaggagatgcgcggcgaggagccgccccgtctgtacggggtgctcaacgggctgctgcgcatgcgcaacgtggacgtgtacgtgactggcagcaactcgaagatgctgtccaccaacgtgatgaccgagttccgcggccgcggcgacgaggtccgcgtccgccccctgtcgttcgccgagttcatgcaggcgtacgacggcgacgtccagcacggctgggccgaatacgtgatgttcggcggcatgccgctcaccttgtccatgagaagcgacgagcagaagtccctctatctgaagaacctgttcgaggagacctatctcaaggacatcgtctcgcgcaacgggctgcgcaggtcgcaggagctcgacgacctggtcgacgtgctggcctcctccatcggagccctgaccaatccgcccaagatcaaggccacgttcgccagcgtgctgcattccggcatcagcacgaacaccatcatgcaatacatcggccatctcgaggacgcgttcgtcatcgaggaggcgagacggttcgacgtcaagggacgcaagtacatcggcagcccgaagaaatactatttcgaggacatggggctgcgcaacgcgcgactggggttctgccagatcgagcagacgcacatcatggagaacatcgtgtacaacgagctgcgaacacgcggctacaacgtcgatgtgggcgtggtcgaccggcgcggcaccagcgaaggtgtgccgtaccgcaaacgcctcgaggtcgatttcgtggcgaacctcggcaaccggcgctgctacattcaatccgcataccaactgcccacaccggagaaggtcgcgcaggagaagcctcgctgctcgagatcgacgacagcttccagaagatcgtcctcgtacgcgacgtggtcaaacccgtccgcgacgagcacggcatcctcacgatgagcgtctacgatttcctcctcgacccggacagcctgacgatgtgacgccgtggattggctacaacgtattagacagtccgatgagggacgaatgacatgagattggaggccgacgatggccgacccgaaacatccccgccactacgacgaggcgttcaaacggcagatcgtgcagttgtacgagagcggcaagccatcccggaagatccgccgtcgtggcccgacatcctcaggaccatcgagctgggctactccaacgccaggctcgaggcgtccgacaacaggatcaaggtcaccatccgcatggcctacggcttccaccacgcgaacagcctcatcgcactcgtcatgctccgctgcgccggcaatcatggcgcaagcgacaatcgcgacacgccgttattgacataccgccgttcaatggtattgtaatcacttgtgcgcttttgaagcgtatggatcgggcccgtagctcagctggttagagcgcatccctgataaggatgaggtcggaggttcaagtcctcccgggcccacaggaaaaatgaagcggccgcgagccgctctttttttctcacggggctatagcgcagctggtagcgcatctgctttgcaagcagagggtcgccggttcgaacccggctagctccacagacacaacaaaacccttggaatcagtccgattccaagggtttttgttcttgcattttctgcgtattgcaacaaaaagatgacgacacgccgatagcgtatctcacgagaaaagtcttattgcctcacgactgtcgaggccaccggaagtcggcataggcattccaatcggccactaaatcgaccgatgcccgattcctgagccaaacggacccgaatgccgttcatcatcgacaaagcagtccgcgcctcgcgacgaggatctgccaaaccgtcacgctcgactgctcgggttaaggtgtccatcacgcgatgttctcgtttttggtaatactcataggcaggatgatgctcgttcaacgattcgccttgtagcacggtatatacaaccgcaccatctctggctgagccgcattgcgatccataagggcagcacagatatcacgaatgccgaactgcgcgttgccgctccacatatcctcaggttcaacgccaagagaatgggcaaacgtagccatgtcttcccgatcacgatgctccagcacggcaatcagcaagccgactttgttcttgaaatggtatatgaccgccggctcggtcaatccgcatgcttcggctacctgacgaacggaaaagccccaaaacccgttctgtgaatcacatgcgacgtcacgtcgatgatctgttcacggcgttccgcacattctgattctgctcaagacagatccagctcgttgttgtccttggctttgctcaccgtatcagtcaaatcggggtcgtccacagacaccgcgttctgctggctgagcgtcaacgacagcgaacctttgtaggagtcgccgtattcgtccttgccggacacgcttacggcaatcgagctcatcagacgcttcctgccgtagttcagatccacggtgatagtcggcatatccggctcttcatccgtgccgaagtcccagttgcgcacattgtcgagcgcctgacggtactcgccttcagcatcgcccacaccggtatcctcgatctgctgaatcacccatgatttcagatgcggatactgcgcttcatggctgatccagtaattcacaaagtgctgggccaatgccttgacatcgatttgatacgagagctgcgtgttgccggcagacttggcagacgatgtattcgggaacagctggctgcgcacattcttatcttccagctccacgccgagatattgttggatgaatttgctggcctcggccttcacctcggcagacgttttcgtgcccttggcccggtcgatgtcgttcgagtacccatcgtcgttcatcttgtccagctgatcgtagaacgttcgctccgcgccggtgatgtcccaagcaccgttcttgaccaacgcatccttgacgttcaatatcaagtccgccacatcactaccaacgccgttccttaagtcatcttcatattggtcggccgggtagtagatgtagtaggggtcatcatcataccaaacgtttttcccggcgaatgcgcctttgtgccaagcgagggttgttgcctgttcatctgtcttgatggtcacagacgcggaggagtcattggtggttttgccccagcgaatacatgccagacatccgcgcgtcaagggagtcgtcagtgctgctgtgggttctgagttcgtatttggtgctgcgcagagtggacagcgagttgatcgcgtcgaaggtgacgaccagcggattggtgggctggaagcccagcatcgctttgacggcggtgaagttggggacgatgaatgccaaggccgccaccagaatcgtcgcaagcaatgcgcagagaacggcgatcagcttcttgctggatttgcgcggcggtgccaggacggcggttgcatcagtcgcctgatatgcggcaggagcgggaatcggcaaagctggcaagggagcagttggtgccggctgtggggcagcgggcgcggcgtaaaccgatggggcaaccggcgcggctggtatcgatggtggtactgaaggcgctggcacagcaggtgccggtatcgacgcagtcggtacggctgacgatgcggccggcactggtacagacgcaaccggtgcgctgtctacagacgctccacatgccgggcaaaatcgtgccggcctatcaactctatttccgcagtggccgcagtacgccatcgtgtgcttctcttcctcaaatcggcttgattgccattgcttcaatgttactcttcagcattacgcctcagccagcccctacgcgtaacgatacgaaacgcggcagccttaatgcggttgttttgacgcgatgccaacatcgagctctggccaacgttctggtactcggctacatcttgctgcgagccaagaagcaggccatcgctcgcgccgacgaggccgaatggcggcctagcctcgctttaagcctcaggccagcacctccatggggtgataggtggcggtgtggtggccggtgatggggttccatacccgttcggcgaatgcgcgcagacgggcgacgccctcacgcagctcgccggcatctccggcgtaggagaggcgcacgaagccgcgcccctcctcgccgaaggcctcgccggggaccacggccacgtgctcttcgtccagcagacggtctgcgaattcaccggagtcaaggccagtcaggcgtacgtccacaaaggcgtagaacgcaccttgcggttcaatcaagcgcaataccgggcatccggccagaccgtccagcacgatctggcgcttggcgcggtattcctcgcgcatggcggccacatgatcctgcggaccggccagtgctgccacgcctgcgtattgcgccaaggagttcaccgaggagtgcatgagttcggcgattttaccggtctgttcgatgaccgcttcgggtgccagcaggtagccgatgcgccagccggtcatcgcgtaggttttcgacaggctttccaccacaatggtgcggtctttcatgcccggcaccgcggcaatcgatggtgccacggctgcctctcccccaagcgtttccccgaacgtttccccaaacacgaacggatggtaaacctcgtcggagatggcccaaatattgtgctgcttgcatacttcggcaatacgcgccagttcagcggcagaagttaccgcgccggtcggattgccgggtgagttgatgattacggcgcgggtgcgcggggtgatcgccgcttcgatgtccgccgcgttcacgcgcatgccgtgctccggacgcagcgccacggtgaccgggcggccgccgcacagcatcacttcggcgtcataggaagtgaagaacggcgagggaataatcacttcatcgccggtgcctaccacggctttcagcgccagaaacaggccaatcgtggcaccgtcaacggcttgaatctcggtttcgggatcataagtgagtcccttcacacgggcggagtaatcggccacggccttgcggtattcggggacgccgagcacgttggtgtaccgagtgcggccagcctgtgcggcctcgcaagcggccgccacgatatgcggcgcggccgtggcgctgggctcccccacggtcagtgaaatcgcgtcaggcacgcgctctacacggtcgaatacgtctcggatgccggagcgcgggatattcagggcttcggcggacaagctcgcgggcttggcggtcggcacagcaacccgtctggcagcaggcacagcagcagatgcaacttcggacagaggcatgttggaaaacttctgcatatcatccctcctcaatggaattatttcgtcgttctcttatttcagaaggaattattacattcaattaggactttaggcataaacattccaccacacaacagaaaacacaggaagaactactgaaattaccaggcaaaatcggaaagccatcgcattccggcaacaggtacagtgaacacagagcacaacgaacggagaagacaccatgaccgcgattgacgagaccgaccagcgcatcctcaccatgctggaggccgacggccgcgccacgctcgcgcaactggcccaggcgaccggactgtccgtctccgccgcccagtcgcgcgtgcagaagctggagaagcgcggcatcatcaagggatacaaggccatcatcgaccaagagcagcgcggcttgcccatcagcgcgttcgtcaacgtgaccccgctcgactactcagccgaatcctcgattccggacaagctgaacaatatcgacggcatcgtctcctgctattcggtggccggcgcccccagcttcgtactggtggtacgcgtggcctcccccaccgcccttgaggaattgctcaatctcatccaccgcacggtgccggtgagcaccgagaccacgatgattctgcagacctacttcgcgcactgactgcggacacggtaccccgcgcgccgaagacctcgccccctacggcgcacgattcccaacgggcacatccgacatcacccaagtccacctttatgtccactatatgaacgcacctccggtgtgatgcagcttccatttcgacccgattcacgcacagacagacatccagcaatcgccgaaaaaactaacaaacggaaacttgaaccaccccataaccacgccgatagctttcccgttatccgagcgaggctctatgcagcaagggcctgcgcgcatagaataaaaccgtcttaattccctagcaaatcgaggagaatcatgctcactgacgagtacatcaagcgtgtctacgaccaggtcgttgcccgtgacggcgatcagccggagttcctgcaagccgttcgcgaggtcttcgagaccctgcagccggttgtcgagaagcacccggagtacgagaaggccggtgtactggagcgcatcgtcgagccggagcgcaccatcaagttccgcgtggcctgggttgacgacgagggcaaggttcaggtgaaccgcggctaccgtatccagttcaactccgccattggcccgtacaagggcggactacgcttccacccgaccgtgaccgagtccgtcgtcaagttccttggcttcgagcagattctcaagaactccctgaccacgctgccgatgggcggcggcaagggcggttccgacttcaacccgaagggcaagtccgacgctgaggtcatgcgcttctgccaggccttcatgaccgagctgagccgccacatcggccagttcaccgacgttcccgccggcgacatcaacgtcggtggccgtgagatcggctacctgttcggtcagtacaagcgcatccgcgacgagtactccggcgtcctgaccggtaaggggctggaattcggcggctccctggcccgcaccgaggccaccggttacggcgtgtgctactacacccaggaagccctgcgcgtgctgcgcaacgactccttcgagggcaagaccgtcgtgatctccggctccggcaacgtggccacctacgccgctcagaaggctgagcagctgggcgccaaggtcgtcaccgtctccgactccaacggctacatctacgacccgaacggcatcaacgtcgaggtcgtcaagcagatcaaggaagtcgagcgcggccgcatcaaggaatacgccgagcgcgttccgggctccgagtaccacgagggcagcaagggcgtgtggaccgtcaagggcgacatcgctctgccttgcgccacccagaacgaggttgatggcgaatccgcacagaagctcgtggacaacggcgtgaccgtggtcgtcgagggtgcgaacatgccgtccaccccggaggccatcgaggtctaccagaagaacggcgtgctgtacggcccggccaaggctgccaacgccggtggcgtggccgtctccggcctggagatgagccagaacagctaccgcctgtcttggaccttcgaagaggtcgacgccaagctcaagtccatcatggaagaaatcgtcgccaactccctggccgccgccaaggaatacggtcacgagggtgacctgatgctcggtgccaacgccgcaggcttcgtcaaggtcgccaacgccatggttgcccagggcgtgctgtgacgcttgccgctgagcaatcgctgagcagtgctgagcaatactaagcagtactaagcagtagcgtaatgcccttgcttccccgtgaggaggcaagggcattgctatatgtacaacgagcaacaagtgctatccccaaatacgtaagcccgataacaacttagcttccacctccataaccccggaactcaccaccgtcgatcagcacatggatcagcgcgctggaccatggccgacgtggtcatcaaagccatcaacggagtctcttcaccgcgcgtgatgcacctgaacaccgatttggtggtgcgtgattcggcgtaattgccacgtggttgtcggcaggactctagataccgcgtcacaatcacccagtaatgcatcacgcagtgtataactcttccgcggaaacgaacaccattcgttcatcatccatgtagcgggttcgcgtggactcactcaccggattcttggtgaacagcataagccacgcattacctgcctgatagccgcggactaagccagcacgctgatggagcttttcaatagcctccgtttcgttgaatgaattacgccatttgcattcaccgaacagaatcgttttatcgagcgaatccgcagcaatcacatcgatatcggtttgctcgtgagcaatcggatcattgccccaccatttgccgaactgagtggcaacaaaggggaggttgcccatagcgttgtttcgaataagccattgcaggcaaatcgtctcaaattgttgaccaacataggtatcaaacgctggtccaaaagcgagtctgctcgtaacctcctcgctgatattaccatccaaaatgctcatgttgcgccccacaaagcggaaccaatatgcaaagaagggatcgctcaccacatacattcccttgcgcgatttactcggatcttcaccaaacggcacttttcgctcaattaagcgcaaatcgaccagcgttttcagatatgctccaatcgaatcagatccgacacccgcatgttcagcgataagctttggcgaggaattaccacccgcaatagattgcaatatcgaataatacgatgccggttcacgaagctcctgacgcaacagcatcataggttcctcacgcagtacgcccaagttgtcgaacatcaagcgcagcacattggattcaaagccatcggcttcctgtatacgggccagataatatggcgtaccgccgaaagtcgcatagtattggaccagttcttgcggagatgtgttcgttagaaattttgccgcatccgcatagtcgaatggcaggagtcgaatctgtgctgtacgacgcccgtatagcgggcttttacgccccaatacgtcgttttccatgaatccctcgttactaccggatagaatcatcgtcacttttgtggcgaggaatccatggtcaattgctatctgcaacatggagggtaatgctggctcggcggcagctgcataagggaactcatcgaatacgaacaccatacgttcgtcagtctgtgcagcacgttcagcaacaaacgataacgcatcagaccacccgccaaacgacggggtggaatccggcataccaaagaacgacaatgccgctcttgagaaatcttcaagattcatcttggcgctttgctgtatggccgtgaagtacagcacgcgtttatctttgacaaattcgtcgatcaacgccgttttccctacacgccgtctaccgtacagcaccaccatttcgaacgaatcgctggtaaacagcttttccagcacttgtaactcgtgctctcgtgcgacaaacattgcagccctccgatccgcctactgcccaataataagagtatcatggttaatgtaatcacgattaccttaattatgatactgataattgttgccctaccgcgaggaggatcttccttccgctgtcaaaacgaaagcccaacagtccagactgacgagcagcaacatcggcagatcaaccgctgacgccagccagcctgacagcacaaatcagcctgattgcaggcatataggcactagttagcgaaaccggctcttcgcattttggtgcgtaggggccgtgcggtttgattcggtgtgtgattgaaaaagtgaatgaaaccgcacggcccctacacgccaaaaccggaagagcccataaagtcccctcagtagcgccaacctgccagtcctttggcggaaccacaccacatagaccttcctcaacggcgccaacctgccacacgctggcagaccaacaccgctgtgtgcattctctgcgtcggcggcagtccaaaacttggcccagcaacgacgcttgctgtgcccagcgtcggcagagggccaagaattggacgcatacgacacagaacgcaccctcagcgtcggcagaactccaagatctgtaccgctgacgacggtaagccctccacagcgtcgtcagagatacaaaacctgtcccaacaccgacgcctgccaccccccagcgtcgccggagtcccaagtctcggcccagcaacgacgcctacgaaccccacacataagaaaccgcacctccgatcatcgaatctgaattacttcagtccaacaaccggggtgcggttcactgaggggagttctgccagtatagctatatcagtcgtcgccgagcgtgacgtgcacgccgccgaccagcgagctgaccacgttgtagatcagtgccgcaatggtggccagcagggtgaagatcaccacttcaacaatcgagaagatggtgacgccggagaccacggtggtaagggacaacacgttcttgagatcgaaaccgcctgcatcaagaccggtggaagacacaatctgcgtaatctggctgaatacaccgaccacatcaagcagcacccatacgatcgcggaggcaacgacctgaataatcgccacggcgatggacagcatgaacgtcaccttggccacggaccaagcatccacgcgggtcagcgacaagctcatgcggcgagccctgggggcgctacggcgaggtgccggacgcacgggagtggcggcacctgaagaaggcaacgcggattcttccggatcgctggacacggagcgtgccacgcggggagcgtgctcagtaccgatcagcggctcgacatgctcgttctgcgtattgccgactgccggcggtatgatccggggctcgttgtcttcgagattctcgctcatcgtttctccttaacaggcttggcggtagcctctgctgtatgcgaggctaccagcttttcaggacgctgctcacgcctcgtccgcgttgttcacattctcgccggattgtgcggtctcggcggtgccgttcgccgcggcatcgccgccatcctcgggctcgtccttctcctcgttacgggcgatggagagaatcgtgtcgcccttgtcgggcttggcaaaggtcacgccctgggtgttgcgcccggtgcgtttgacttcgtccacgttggagcgaatcaccttgccggacttcatgatggccatgacctgatcgtcttcggacaccacgagcgcgccgaccagagcaccacggccctcgaccagttgcacggccttgatacccaggccattgcggccctgcagacggtattcgctgatggcggtgcgcttggcgaagccctcgttggtgaccacgaacaggtccttgtcggagtcgccagggaccacatccatggccagcaggctgtcgtcgttacggaacttcatgccctgcacgccggcggtctggcggcccatcgggcgcagctgctcgtcgtcggcctggaacttgaggctcatgccgagtttggagaccaggatgatgtcgtcctcggcgttgcacagcgcggcgccgatgagctcgtcggcgttctcgccgttctcgtcggccatgaggcgcacggcgatcaggccgccctggcgcggggaatcgtactcggccagcggggtcttcttgaccttgccggaacgggtggcgagcaccagatacttggccacctcgtagttcgggatggacagcacggtctggatggactcatcaggcgcgaactgcagcaggttggccacgtgctggcccttggagtcgcgcgcgccctcgggcagctcgtaggccttgatgcggtacacgcggcccttgttcgtgaagaacagcagccagttgtgcgtggaggtcaggaagaagtgatccaccacgtcgtcctcgcgcagcttggtgcccttgatgcccttgccgccgcggtgctgggagcggtattcgtcggccttggtgcgcttaatgaagccggagtgggtcacggtgaccaccacgttctcttcggcaatcaggtcttcgacgttcatctcgccggagaacggcaggatcttggtgcggcggtcgtcgccgtacttggcgacgatctcgtcgagctcgtcgccgatgatcttgcgctggcgttccggcttggcgaggatgtcgatgtagtcggcgatcttgcgctgcaattcctcatgctcggccacgatcttgtcgcggttcatgcgggtcagcgtgcgcagctgcatggccaggatggcgtccgcctgcacctggtcgatgtccagcagccccataaggcccgtacgtgcggtgtcggtgtcttcggaggcacggatgagggcgatgacctcgtccagcatgtcgagggccttcagatagccctgcaggatgtggtcgcgctcttcggcctcgcgcttcaggtacgcggtgcggcgggcgatcacgtcgagctggtggttcacccaatggcggatgaaggcgtccaggctcagcgtgcgcggcacgccgtcgaccagcgccagcatgttggcgccgaaggtctgctgcagctgggagtgcttgtacaggttgttcaggaccaccttcggcacggcgtcgcgcttgagcacgagcacgaggcgctggccggtacggccggaggtctcgtcgcgcatgtcggcgatgccctggatcttgccgtcgcgcacggcctcacgaatggagacgacgaggcggtccgggttgacctggtagggcagttcggtgaccaccaggcacatacggccgttgatctcctcagtgttgaccacggcacgcatggtgatcaggccacggccggtgcggtaggcctgttcgatgcccttgtggccgaggatggtggcgccggtggggaagtccggtcccttgatgatgcggatcaggttttccagcagttcctcgcggctggcgtccgggtggtcgagcgcccagtggacgccgtccgccacctcgcgcatgttgtgcggcgggatgttggtggccatgccgacggcgatgccggcggagccgttgacgagcaggttcgggaagcgggccggcagcacggtcggctcctgggtcttgccgtcgtagttgggcacgaagtcgacggtgtccttgtcgatgtcgcgcaccatttccatggccagcggggccatacggcattcggtgtaacgcatggcggcggccgggtcgtcgccgggggagccgaagttgccctggccgtcgacgagcatgttgcgcatcgaccaggactgggccatacgcaccaaagtgtcgtagatggcggagtcgccgtgcgggtggtacttacccatcacgtcgccgaccacgcgggagcacttgttgtagccgcgatcggggcggtagccgccgtcgtacatcgcgtagatcacgcggcgatgcacgggcttcataccgtcgcgcacgtccggcagggcgcgctcgacgatcacggagagggcatacgccagataggactcgcgcatctcctgctgcaggtccttgcgctggatgcgttcgccggtgtccatcaggccgtagtcggtagtgtccgcctcctgcgggctcaacggctccatcgagccgtccggcgtgaactgctcgtcgccggtgttgttttcatctgccactgttgttcctttagttgtctaagtccgttgtgtacctccctctgacgagggaggttggaggattccgttacgcatcgatccaacgcacgttcttggcgttgcgctggatgaagaggcggcggggttcgacctcatcgcccatcagcatcgagaaggtctcgtcggccgcggcggcgtcctcgatgtgcacctgcttcagaatgcggtgctcggggtccatggtggtctcccatagctcctggtagctcatctcgcccagacccttgtagcgctggatgccttcgcccttgggcagctggcgtccgttggccttgccttcggcgagcacgcggtcgcgctcggcgtcggtgtacacgaagtcgtgcgggcccttggtccacttcaggcggtacagcggcggcatggccacgtacacgtagccggcggtgatcatcgggcgcatgtagcggaagaacagcgtcaggttcagggtggcgatatgcgcaccatccacatcggcatcggccatgatgatgaccttgtggtagcggaccttggagatgtcgaagtcctcgccgtagccgccgccgaccgcggtgatcagcgattcgatggtgtcggacttcatcatgcggtccaggctggcgcgctcggtgttgaggatcttgcctcgcagcggcaggatggcctgcgtgatcgggttgcggccctggatggcggagccgcctgcggaatcaccctccacgatgaacagctcgcactcttccgggttgttcgactgacagtccttgagcttgtcgggcatgccggcggactcgaagatggacttgcggcgggtgttctcgcgggccttcttggcggccagacgggcgcgggatgcctcgatggccttctggatgatgttcttggcctcggccgggtgggcgtcgaaccagtcgccgagcttgtcggtcatcacgcgctgcacgaaggtcttggcttcggagttgccgagcttggtcttggtctggccttcgaactgcgggttggtgagcttgacggagatcacggcggtcaggccttcacgcacgtcgtcgccggagaggttctcgtccttgtccttgaggatgcccttgtctcgcgcgtaacggttgaccagcgaagtcagcgcggcgcggaagccctcctcgtgggtaccgccctcggtggtggagatcgtgttcgcgaaggtgtgcacggcctcggagtaggcagtggtccactgcatggcgagttcggcggagatgccgagcttcaggtcttcggcctcgaagctgatgacgtcctcttccaccggcgtggccttgcgcaccttgaccagatagtcgacgtagtccttgatgccgttgaggtactggtaggtgacggtctggtgctttgcgccgggctcgtccgcggcgtcgccggccacctcgtcgccggcctggtcgttctcacgctcgtcagtcaggctgatcttgaggcccttgttcaggaaggccatctgctggaagcgggaacgcagcgtctcgaagtcgtagatggtggtctcgaaaatcttcgggtcggcccagaaagtcacagacgtaccggtggactcgccttcggtcatcggctcgccctgcttcaagggcgcggtggggtgctggtcgatgtacgtctgggtccagtggaagccctgacggcgcacttcgatgtccacgcgggtggagagtgcgttgaccacggagatgcccacgccgtgcagacctccggacactgcataaccgccgccgccgaacttgccgccggcgtgcagcttggtcatcacggtctccacaccagagacgccctcgccgggcacctcatcgaccgggatacctcgaccatcgtccaccacacggatgccgttgtccggcagaatggtgatctcgatatggctggcgtatccggccagcgcctcgtcgaccgagttgtcgacgatctcatagaccaggtggtgcaaaccgcgcgggccggtggaaccgatgtacataccggggcggatacgcacggcctcaagtccttcgagcaccctcagatcggaggcctcataatgctcgggggccatggattcgtcaagttcgccttcggtcaattccgcattgttgatgcgttccgcagccgccttcagctgctcctctttgctggtttcgtctgccaacaggcttccttccgtgactacagggtcaacctccgtcatgaaggtcattcacggaggtgatatggcttacgaggcccgtaaagggctcttctagccatttgaccatactgcatgtgattttactcgtctaacccgacgagcgccatagcgaggcttctgcgaatttgtttggtatcttggctaccgccgccgagcccatttgcgtgtgtatccggcggccgggccggtcacgcgaatctcggtgatggtcaatcctttgagattgcgacggatggtatcggtgagttgggggataaggtaggtcagctgcgtggcccagaccgtggattcggcacggatggtcagtacgccgtcagtgaaatcggcgactgccgaatggctggcgatggcctgacccaccacttggtcccaatggttgcgcaattgcgcaagcttcatattcgccgcccagacgccattgccggcgatggtggtcatcacgctgcccagttcagccggatcgcgccccggtttgccgaagttttcgatggcctcttcacggcggcgtctgtagtccttcaaggtcgccccgcgacgggagagccgctcgaatatttcggccggcagtttggtctcgtccaggttgagttggcgggcgatcggcgggttcatgacactttccgttctacggacgcgctgtccaccgcggttttttcgtcatacccacccaaactctcattttcccgcgaattggacaaattgcccagagttggcaatatcacggaagctggttcgtccagtgcggccacgtcgatgcgatgggccgattcatagtcgggcacatcgccttcagcggccacggtaatcagcacctgatcctgttttctggcgaaatcaagaatctgcgtgcgccggctgtcgtcaagctgggcgaacacatcatcgagaatcacaatcggctgcaatcccaaccggtcacgcactatttcgaacaatgccattttcaaggccaacgccatcgtccacatctcgccgttcgaagcgaactcgcgggcgggaataccgcccaactcaaggttcatgtcatcgcgctgcggaccgataaggttcacgccgcgagccacttcaccggggtagatgcgttggaaatgctcgctaatctgcggatgcggatcgtcgaacatcagcacttcgtcgaatgaaggcgcataagtgagcgtcacctgctcgccggcaccggccaagtcggcgtaaatcgcggcaaatggctcggcaagcagaccgatcacatgagcgcgcatacgggtcaacgccacaccggcttcgatgaactggccggtccagatttccaaaccgctcagaaccgcatccatcggctggccattgttgacattggcattcaattgcttcaacaatgtggcacgctgtttggcgatgcgcgtgaactgttgcaacgtctgcatgtatccgggctcgagcagagccgcagcctgattcatcatggtgcggcgtgctcccggatcgccggacaccaaccgctgatcttcgggagtgaaggaaacgctgggaatcttgccgatgatatcgcgcagatacagcgacgaccccgagttgatgcgggctcggttggcaccacgcgcatgaattgacgcttcatacgtagtggtttgaccggcatcatcagcgacgttcgcgcggatggtggccgtggtctgcccgcgttcgatcagcggcaacgtgctggacgtgcgatggctcgatccggtggacagcacttcgacggcttccaccagattggttttgcccagaccgttcttgccgaacaggatattcacgcctggtacgaaatcgaccactacctgactccatgagcggtagtggtcgagtgcgagacgggagatgtgcattagcgaatcgttggaaattcagggatttcagttgttaaagcgcatcggcacgagcaggtatcggtagtccatggactcgtcggaatcagcttcctgctggccattgaactcgaccggcttgaccggggtcgtcattttgatgcgcacgaatggttcggttacggcggacagaccctccttcaggtaggacgggttgaatgccacggtgatgtcgtcgccatccatgtcgatgtccagtgtttcgttggcctgagcctcgtcgaccgatccggcggacagcgccacttcctgaccggtgaaggtcatgcgaatcggagcattgcgttcggcgaccaaagccacacggctgatggcgtcgagcaaatcctgcttgttgactacggcctgaatcggatattcgtcggcgaacaggcggtcgaccgccgggaattcaccgtcgatgagctgggaggtggagacgcggccggcgttttcgaagccgagcagcgtcgggctatcggcatcgaaatcaaggcggatgttctggtgctcgtcaagagcacgggccacatccttgagcagggagccgcgaaccagcgtggtggtgtcgacgtccgggttctgcggagtccaagtgaaggtggcgcgggccaaacggaagcgatcggtggaggtcatgacgaccttgtcgccttggaattgcatgcgaacgccggtcagtaccgggcggttttcttcgcgggagacggcaacgcacgcctggttcacggcctgaacgaaagtcggggcatcgacttggccgagcatggccggtaccacgggcagatccgggtactcggtgtcgggcatgagctgcaaggtgaacttcgacttgccggacgtgatggtcagcgtggagccgtcggtgaccaggtacgttttctccgaacgcagcgatttggtgatatcggccagcagcttgccctgaaccagtacggaaccggcttcgtcaacgccggcttcgatgtggtggcgagcggaaatctcgtagttgaaggcggagaattgcagcgttccgtcaatggcttccagcttgacgccagcgagaatcgggttggagggacgtgcgtcgatgactcgggaggtccaggctacggcgtcggccagggctgcggtatcgatttcgactttcatgtgtgattgttcccttcgtcggattggctgaggaatattctagccgttaggtggcgaacttacgtacgctggatgaccggctgttactatggcgatgatgcttttcacgtaactgagtaagtaatcgccataataaggccggtggatagtgtggataagtagggctgagccctacaactgcaacggttcataagtccctgaaaattgtggacaaattctgcatggcttgtggataagtgggcgagttttccacagccagttcgtcgaatttgagttttccacatcgaggtcgcggttatgcacgagttttccacaacaaaatagtgggtaatccacgagttatccgccgagtttacccacatctgtgcacaactatgtggataacttttttggttttcgcactttcgcacggcgtgttgaagactgtttttcgtcgaggagaatcgattctggagaccgttttcggcactttttccgtctcgctcgcccaaacccgcaaaatcggtcctcagaatcgattctctcgtttcatggtttttttgcgtgttccccttcgaaactcccctcagtcgtctgcgccgacagatcccctcacaaaggggagccatgaggaatctaatgtctcgaatccgttgcctcgacgtatccaccagaatccgcctgagcaaccaaaaacggcacttttcggaaagtcagtccaaaaagtgccgtttttcgtctctcagaagcgttgtgtcagttggtgttgctttgcttgaggcgaaccgtgagctccataacgtagttatagatctcctgtttttgctgcattcggtcactgattcgagtgcaggcatgcattactgtggtgtgatcgcgtccgccaaagacctggccaatatccatcaggctcatactggtcatttcgcgagccagatacatggcgatctgacgaggaacagccacgtttttggttcgtgatttaccgacaagatcctcaaacgtcaggtggaagtacttcgccacctgactgatgatgtccgtgggcttgatttccacatcggtggtgaagaagtcctgcaacgtctgctcggccaaggcgcgggtcaccggctgattactcagcgaggccacggccgtaacacgggttagcgcgccttcgagttcacgaatgttctcggtgaagcgttcggcgatgaggtccaacacatcgctggggattttcgaaccgttcatcgaggcgatcatgcgaagaatggcgattcgggtctccagatccggcggcttgacgtctacggtcaggccggattcgaagcgcgagatgagtcgagcctcgaaacccttcaaattcttgggcgctacatcggaagcaatgacaatacgcttatttgcctgatgcagtgcattgaacgtatggaagaactgatccaaggtggcttccttgccgccgaggaactggatatcgtcaataagcaacacatcaacctgtcggtatcgacggttgaattcagcaatctgaccctggctttggttcgggttttgcagcgcgtcaatgaattcgttcgtgaattcctcagacgtgacgtatcgaaccttcagcccgggatccttgaccagtgcatagttgccgatggcgttcagcaagtgggttttgcccaggcccgatccgccatagatacacaacgggttgaaatcctgcccggaaccttcggccacggccagtgcgaccgtacgggcaaaacggttggaatcgccgggcacgaaggaatcaaacgtgaagttcttattgagatgagtctcgggatcgcgattcatcttctgctgaccgaccgggaactgcggctcggtggcgggcatcggttcccgcggtgcggctgccggctttgcaccataggattctttaccgaattcggcgacagtcggagaaatttccgaaggatatggctgcgccggctttgcctccgaaagcggttcgggctcggttttcggcacgaccttgaacgcgggaaacatattttcgccggttaccgtacgcaatgcctgaagcagggaatcgttcaaatcaccctgaatggcttgaagcgtgtcgttgttgtccacacacagcacgatggtcgaaccgaagacgccttcaggaacaacgccttccaaccagcctttttctcgtgggctgagcgaagcgctgtgtttgagcaccgtcagcgtgtctgaccagatgtgggcggcctcgattacggggtcgccggaagcgttaaccatggtggccccttctgtcgctgtggcgaaatacgtacaacagataatatttactctggtttagacaagttatccaccgtgtcgcgtgttgaaataactggattgtgaataacaaacatgtaatttgtggataacttttggccgtgaatggttggtattccgccgattataagagatttggggcgtgtctcgcaacgtgtcgaaatgtgaaaatactccgtccgttttgacttgagggtaggggtgagagtactttggtatagcttgactcacgtgagggcagcgcgaagcgttgccgaatagacctaggagcaatggattatgaagaggacgttccagccgaacaaccgtcgtcgccacatgaagcacggcttccgcctgcgcatgcgcacccgttctggccgtgcggtgatcaaccgtcgccgtgccaagggccgcaagaccctctccgcctgatcattccgatcagtgccacaggcatagtcgaggtggagaggcttcaaagccatcgtgatttcgtcaccgtgctgaaacgccggcgcaaagcaggtggcaaggatatcgtcgtgcactatttggtgcccgacgaccatcatgatgatgacgaccggacggtgcatcgccgtttgggattagctgtctccaaatcggtaggacatgcggtcacccgtaatacggtgaagcgtaggtttcgtgtattggccagagcccatgaggatctgctgcccgcgcattgcgatatcgttttgcgcgccaagcccagtgcagcgaccgcatcgttcgcttcgctagatcagcagatcgcgaaggcttttgccacggtggcgcataaggtggctgaggcatgacagcttctttcaaggcggtgatgattggtggggtgcgctggtatcaacagcacatctcggcaaacacaccgccttgttgcaagtattatccaacgtgctcgaattatgccattgaggcattggaacggtatggcgcgttcaaagggggagtgctcgccgtgctgagattactgcgttgccggccgtggagtcgtgggggaatcgacgatgttccacaacggtattccgttttttacaggttttcgtggtcgaaggctcatgaagagcctcgactgacaccattggccacaacccaaagagaggcccaacgatgaactcaaatgaatttctgcttgatagcgggttttggggatttctatataaaatcctgactcccgttgagtggttgcagacctggatcatgaagatcgtgcatgacttcttcgtgatgctgggcgtgagcccgattggtgtctcatgggtgcttgccattatcatcctggtgctggtggtgcaggcttgtatcttcccgctgttctacaagcagatgaagtcgatgcgcaagatgcaggcattggcgccgaagatgcagcgtattcagaacaagtacaaaggcaagacggatcaggcttccagggaggccatgagccgtgaaaccatgaaactgtatcaagacaatgacgtcaatccggctggctcctgcttgcctatgctcattcagggcccggtgttcatgtccatgttctatacgctgtcggccattccatacattgccaacggtaaacgcgatgcgttgggcgcgttcgacgtagcaaccgccaagcaattcacccaaaccgatgtgttcggcattgtcagcgtgaccgataacttcaccagtgctgccgctagtggcaaggcggtcatcggtatcttcgtgttcctgatgtgtttctgcctgtggtttatgcagtacttcagcatgaagcgcaacatggcagctgcttcgatgaacaagcagaccgagaccatgcagaaggctatgctgtggctcttcccggtgatgtacatcttctccggtgtcgccatgccgttcgccgtgctggtctactggctgaccaacaacgtgtgcaacctctgccgcacattgtggcaggtgtacgcattcccgacccctggctctccggctgcggcggacaaggagaagcgcgatcatcgtaatgagaatgctcgccgcgcaaaggccggcctgccctctctggaagaagaagcattggccaaggccaaggaagaggccgagcgtaaggccactcagggctatcagcgtcaacagcccgtgcgtaagcgcaaaaagaagtgacgactatgtcggtgcgagttcgatgtttcacgtgaaacattcaacacgcaccgacattactttctctgttcgggggagcagggcttagacttggaattcaaacacgacatgaaggagtagcgtatggcacaggatgacgtgaagtcgatcgaccagctcaacgaagaggctgacatcgccgcggattaccttgaaggcctactggatatcgccgactatgagggcgacattgagatgggcgtgcgtaatgaccgccccaccgtgcaaatcgttgctgatgacgatactgacatcaaacatcttattggccgtaatggtgaagtcgttgatgctctgcagcaattgactcgtctggctgtacagcagaagaccggcgagcgttctcatctgattgtggatgtcgacggtttcctgaagcgcaagcgtcagcacctccgtgatatcgccttggatgccattgacgcagtgaaggattccggcgagccgtatgacttgaagccgatgaattccttcgaacgtaaagtcgttcacgatgtggttcgggaagaggggctgaagtctcgctcgcacggtgaggagcctcatcgttacgtgacggtgtatctcaagaatagagtcgaggataccgccgaagacgacgagcttgatcaggagtaattgctcggcgagtttttttgagatgacagggacgttcgacggatgtcgtctttgaacaaactaaagtgaccgcatggagaatggcgtcgtaatgagcggcgccattctccatgttgattgtttcacgtgaaacatggtgagggagatggctatgacggatcagctgcaggggtcacctgtacttgctgaggtcttgggtgatgcgttgccgaagttggagcgtttccatgccaagattgccgaagagggtgaacctcgtggattgatcggcccccgtgacgtcgatatcatttgggaacggcatattctgaattccgctgcgattgtgccgtacgttcggaatgcgacgaatggtattcgcttcaaaacagttgccgacgtcggcagtggtggtggttttcctggattggtggctgccgcgtgtttgccggatcatgacttcacgctgattgaaccgatggagcggcgaatcgaatggttgcatgaatgtgttggcctgatgcaactgcagaacgttgagattattcgtggacgctccgatgccgtcatccagcaggtacggaagcgggaaattcatccgttcgctgttgtcacgtgtcgtgcggttgctcctatgaccaaactctctggctggacgttgccgttgctgaaaccgtcaggacagttgatcgcactgaagggacggtctgctcaggctgaaatcgacaaggctggcaaggagattgcaaaattcggtggtcgtcgtccacgtgtcgttgaggcggctgtcgggccggatcttgagcctacccacgtggtgattgtggataagcgatgagtggagtactgattgagttatccacatttccatatatgcgtaaaagttatccacatttttacgggacgatgtgcataatgatgaaaacattgatttttcaatgttttcgtctgtgaatacacaatcttacactcaacgtcattcacacttatccacacttatccacattgcatatcgcaattgtggataacaagcatcatgtccatacgaatgagaacactggaacttacgtctgtgcaaggaggagcgatggccaccaaggatcatcagtcggaacctatagaatcggcttccgaaacgcttcagcgaatattcgatggtcacggttcagtgcttggtagccaaatggctgatgaaagctcacgctacgatgtactcaagaaaaccgatttccccaaacctcaacgtacccgtcgtattgccgtggccaaccagaaggggggagtgggtaaaaccacatccacggtaaacaccgctgcggcgctggcgaacaagggcgcgcaggtgttggtcatcgatatggacccgcagggcaatgcctctacggcgttgggtgtatctcatgcatcgggagagccctcggtctatgacgttatcgaggggcgttccgatctgggtgatgttatcacggtctgtcctgattttcccacacttgatgttgtgcctgcatcaatcgatctcagcggtgctgagttggaagtggctgatctgcccaaccgaaacacgttgctgaaggaggccctagacctctacctgcgtcaatcagataaacactatgattacgtgttcattgattgcccgcccagcttgggcctcttggtcatcaacgccatgtgtgcagtgaccgagatgctgattcctatccaggctgagtattacgcattggagggtcttggccagctgattaacacgattggtttggtgcaagagcatttcaatcccgtactgctggtgtccaccatgctcgtcacgatgttcgatcgccgaacgttattgagccgtgaagtatataacgaggttaagggacactatcccagcattgtgctgaataccaccatcccgcgttcagtcaagatctccgaagcgccgagtttctcccaatcggcgattgcctatgatcctcgtggcataggtgccatatcgtatggtgaagcagctttggaaatcgcacagcgttcgcaacaagtccttgacaccattgatgcgaggaggaacaagtaatggcatcaaaatcacgacttggtaagggccttggcgctttgttccccacattgccaggggaggagccggtggcggagcagcccgcaatgattgcggaggattcgtctactccggaggccactgctgacataacccccgccaagaaggctactgcccagcaggaatcaaaacctgccgtgcctcagacgatatcgtccagcaaggcagtcaagaaagccgccggtaaacgcgcatccatgcccgcattggacaccattactcatcctagcgacctgtttttcggtacggagaaacctcaaaccggtaaggtcgccgcacctcagcagggcggcaagtcgtctgcgtctcagacggcacatcgtacatccgtcactgtcaaagatgtttcacgtgaaacatctcagactgcatcggcggcaaagaccgctgacacagataagaaggacgagctcaagccggtagccggtggttatctggctgaactcaaactgtctgatatcgggcccaatgcacatcagcctcgtaccatcttcgacgaggatgagttgaatgagctgtctgcttccattaaggaagttggtgtgctgcaaccgatagtcgtgcgcaagcgtccggcaagccagattgctgcggccaaagccgccaagcacgacgagacggaatccagcacgaatccgtttgccggtcatttggacagcccgtatgagctcattatgggtgaacgtcgttggcgtgcatcccagttggctgggttggagacgattcccgccatcgtcaaaaccactgcggatgatgatatgctccgcgatgcattgctggaaaacctgcaccgtgtggccttgaatccgctggaagaggcggctgcctaccagcagatgattgaagagttcgggttgacacaagtacaactgtccaagtcggtgtccaagtctcgcccgcaaatcgccaataccttgcgactgctgaacctgccggcctctgtgcaaaagagagtggctgccggtgtgctatcgtccggtcatgcgcgtgcgctattgggcctgagcgatccggaggaaatggacaagctggcttctcgtattattgcggaaggtctttctgtacgcagcactgaagaaatcgtcgccatgaagattgcgtcgggggagcagccgaagaagcccaagacgtccaagaccaatccttgggttggttccgccatccagcagagtttggaaaatcatttcgacaccaaggtgtcgattaagggcagcaccaagcatggtcgcatcgaaatcgtcttctcgtcaccagaggatatggatcgcatcctgcagctgctggtgccaagccaaggcgatgccgattccaaatgggtgtaacacgataagaacattcgtgttgtcgccggcattattgctgtgcagtgcgttgtatgcgcaagacgttatagcctctgcgtgattcctggcaggggcgtatgcccgcgctgtagcccctgtcgcaatagaaaacccctcaggctggagggacaatcacacatcgtgattctccgcgcctgaggggtctttctatgcctttgaccgatacgtactatccaagggcggcatgctgtaacactgacctagcgttgctcctatgtcacaggcagcagccagaacagcaagccaccatcagtccgccaccatcagtccgtaagataggcctgcgtatccagcgctgcacggcagcccatgcccgctgcgctgatcgcttgacgataagtacgatccacgcaatcgcctgcagcaaagatgcctggcgcactggtcaccgtgctggcaccctgcaccacgacatatccatcatcgtcacggtccacaacaccggccgcaaaatcagtggctggcgtatgaccgatagccacgaatacggcgttggtgtccagcgtgctttcttctccggtcaccatattacgtacggcgatgctgctgacactggccggtgctacagccggtcgtttgagcgtcaagccaggaatggcaataggtgcaccggtgttctgtgtgggggaggaggtgccggtaatggaggtcaccactgtgttggtcatcagagtgatggtcggattggctttggctcggtccaccatgatctgcgaggcgcggaagctatcgcgtcggtgaatcaaggtgaccgaagaaccgaaccgggtcaggaataatgcctcttcaaaagccgaatcgccaccgcctacgaccacgataggcttgttcctgaagaagaagccatcgcaggtggcgcagtacgagacgccatgtccggacagctcctgttcgccgggcaccccaagcttacggaatgacgaccctgtggcgatgataagcgacgatgcctccaattgggagtcatcggagagtgttacacgataggtcggcttgaccgaatcactctcacacgcctcgatggaagagacatcgtctgcgatataggttgtaccgaagcgcttggcctgttccttcatgcgatccataagatccgggccaagaataccttccgggaatccggggaagttctccacctcagtggtgttgaccaactgtccacctggcgacaacgcaccagtgaccataacaggattgagacctgcgcggccaagatagatggcggccgtgtagccagcgggaccagaaccgataatgatgacgttatgtttcacgtgaaacattgtcacacccccatacgatattccgtgtcattcagccagatgcgaagaaggggcggtaccgtcgaatgtatgcgaacggtaccgccccttcttgggtcagttatcggcatagatgccgattagaagacctccaccttttcgatgtacagctggttctgcggcaggctatccgatggcacccacagcagcagatcctgcgtcttgacggctttggtgaacttcacctcagtagtgccaccttcagcaaaggtgaattcggccacctgcttgccttgagtggggtccccagtggtatttgcgcgaatatagcccttaccaccggatgtgcggatggtgataaccatgcggtacgcatcctgcggctggtcaaggtgcatgtagtatgcgtacccggattggccgccaggattcgacaggaagttggcgctggaaatcgtaaacgccgtgttgttctcatggctcggttgcggaacagcgctggaatccttatcgccggacttcttggccttggtcttcttggacgacgaatcagcagtctcggacttcttggacttgtctgatgccgagtccttggattcgctctgagtggcatcactcgattttgaagaatcgtcagtggtgccaccgttcgtcgtgttctcgctgccaccaaatggcacagcgtcagcattgatatcaggccagtcaccttcactggagttgctggaagcatcggcaggattgtctccggaggatcggaacgcatgcactgcccaaacagccgctgccactaccaatatcagagccacaatgatggcaacgaccttggtcgacagtttgccgaacagatgttcatcgggcagcttgctgtcaacctcgtcatccggcacatccttcggtgtgaagctcggaggaatggcgcttacttcggcaatgcgggcctgctcctcttccaaggcacgcagcgattcctcaccaggagccacagcacggccgctggcgtcgaacacgggaatacgactggttgtctctcccacggtggcatcgggaataccgccggtaacaataggcactgtcaaccgagtattatcacccggaccgccgatgggggccggattcatttcgctgtaccagtcaccggtgccttcaccggaaagattttcgtgctcccaggcgtcagaaaggttgaagtcaaacagacggcgggcatcagactgagactggttaccgtcagcagtactggacccatcaggcagaggaaccggtgacatcgcgtgcggagcggggacggcggccgtctgaaccggcagggaaggggtaatagacaattccggaagactgctgctgttaatcaacgtgctgggaataggcacgatatcagtctcgttggcaggcttcagtatcgccttggtaatcgagcaatcgctttccacgctcggcaaagcaatatcagcatcgctcagttcagagagcggcttccaattacccaacaaggcgtcgagttctacaagggcagccattggcaacgtatgatcgtcgggctcgctcaaggccaatccacgcttgcaaatcacgcggaattcgccaggggtgtcttgcggcaaggcacgcagattgaatgtgggtgtcgcttggcttggcgtgcgtgtcagcagggtatagagtaatgccgcaagctggcgaatcgcataccgttcaggaccgtccgtacgcagatcggtagcggacgtatcggccagcatcgtggcacatggtgcatcggcaatttgcacaccggaggtagtcactcgaacggtgtcggttgtgatgacgatgccgctgggagtatccgcaatgacctcgcgcagcacgtcggcgcattctccgataatcgaccggatggcgctgtagctgagcggcttggcggtatctaccatgtagtcagtcaggcattggccgctatccaccggcatgacaatgagaagtacgtcggattccatacggtatttcagtatgggaatcacacgatcagggcgagtggcggcgatgcgaccagcgagcttatcgattgcggcgaaagcgctgcgatcggtaatgatgaacagctggcaatcctttgccagcacacggtcgttggctttccatgcctgaatgccaggctcctcacgcaacgatgataccaaggtgtatcggttgagaatcgtgtctccgagttgcggtttcatagtgcgttcggctccgtgtgattggtgttcgagattggtcttagatattctacgtgcggggctatccttgacgggctccgtctcaggattgatttacgtagcgtcgacttttttccggctgggctgtcacagcaacgtcctcactggccggagtcttgtgtagacgggccagtatcgagtgataggcgctgatgagttccggggtgtgtaccacccacaacacagccacatatactacggccagcacaatggtgagcaccacgcagatggccagcgcagaccaccagctcatgtgcccgcctactggtcgaatatccgcgccgagcagtgcgactaccggtcgtttgatcagccagaccacaactccggaagccagtgccgccacaatggccttggcatatgtcctcgtgatctcccgaccgccaagattgccttcgaacttgcggcgcaacatcatcaacgtcagcggcaacgccagtaatccaccgagggtcaccgagcaggcgatgccgagtacccaatgctcagggggaagtaccatcatgccgatgatcatgaatattgaggtgaatccatactgcatcaccgcggacaggaaggggtgaaggccgtcctcaaaggcgtagaacgtgcgctggatcagcaggaacgccgaccccaatggaatgcccatagacaaggcgataagcgcataggagatcaacatagtctcgtccatcgagacggacggaagcaatgcacggatgatcggttcggggaacacgaccatggcggcggcgaagaacatgatgagcaggcccacattattcagtgcgctgaccaggtcgtgccgtgcctcatccagattcgcagctgcgatggaacgggagattttggggaacatagccgtggataccgatacggcgatgagtgaatagggcaggatgaacagtgtgtacgcattctgataggtcgcgttgcctgccacgctgaacaggctggcacccgtcagttcgtgggcgcgctgcggtgcggatgtggcgatacgggtaaggataatgccgcagatctcactggtgatcaccacgcccaaagagcctaacgccacgggacccatagacctgagtccaaagccgccaagcccgaagctgggtttgtacttgaacccgatacgggccagcggcaggaacagtatcagcgcttggaaggccacgcccaaagtccaggtgcctgcggtaagcgcgattttgtcggcggtccagaattcgaggggctgttcattggccttgctgaacagcagaataaagccagtaaaaccggcgcaactaataatgttggcaccggttgagctccacgcatacgtgaggaaatggtctttggcggccaggatctgacccaataccgtatacaggccgtagaagaacacctgaggcatgcaccacagggtgaacgaggtggtcagggctatcatctggtgatcgtcgctacccacgtacaggcgggcaagcagagggctggccgccgccatcaccacggtcatggccaataggatgccgatggccaacgtaatcaggcgattcagtcgttcttgggcgtctttttctttcaacgtgcgcacgatctggggcaccagcacggcgttgaagatgccgccggacaccagcgtgaacacggattggggaatcatggaaccggcctgataggcgttggccgccaatccggtggtgccgatggccgcagcgagaagaatcgtgcggagctgaccggtcacacgggaagcagcggttcccgtggccatgatcagggaattacgacctacgcttgaactcattcgtcggggtccttcttccgatggaactgccgccacaggccgataatgcccagtagcacggcgaagccgatgataatgaagccactggcatcactgatgcgcatcacactggtgatcgcggtgtcctgcgtgttgccgaagctgttgccttcccggtcggtcaacgacacatgggccgtcgatgagccggaagtggaaacgcggatggtgaaggtcacctgagcgtcgctatgcgagggaatatcgatgtcagcggttcgcgaggtgacgatctgcatggagtcagtcagtgagttgacctgcacgctgacggcgtagggaaggtcattgctgacggtgattggcattttcgcggattcgctgaacacggataccgattccgatgggttgatgcgtacgccgttcagaagatcgctggccagtgttttcgcggctttgaccatggcttttcgcgtggctgtcggctggggggagccagacatggaccgcagcgccatatcgtcatgcagcaccagtaaagagccaatccattgcgtcggatcgttgctatgcgaggcggtgtcattggcgtcctgccgggccagggcctgcgggtccaacgacgagacctcgtcggaatcaatctcgttcctcaatatggaggtggccatgcgcatgatgtcatgccggctgtcggccaactgtctcaatgccgaccgggtattggcggtgttggcatcatcggccttgtcgggattgaccgaatcgctgacattgtacggatcggccttggccatggtcttcaggtccgtcagattcaaccaagacgcctgctcgaaggcgctcatcacctgatcgatccagctggcctccgtggtgcgggagaacgtcataagcaggtatcgggatgtatagggctgttccatctggtagaacgcgctctgagcgatcagtcgggccaaccgaccggcatcgctggactcggcctgcgcgtccgtgctggtggcttggcccttggccagcgtgcccaaggtcgattgctccttcagcacggtgacatcgccggcaggcgtatgcaccacgtaggtgcctgtgtgtacggcttcagtctggtcggcatcgaaagaggcatcggcaatcaccgtgtcatagccctgctcgcgtgctgcggtcagcgcatccaacgtccaacagttgttgccctgccatgcgtacgcggagggtgtttcggagtcgcctccgtcggcataccatgcggccgcctgcttggcgttccactgctcagtggtgatgccggccttttcgtaggccgcggtatcgtccagtgcggtataggcggtgatgtcgaagtcggcgggctgcatgatgccggcaatggacggttgcactgcggactgacgccaatacagaggatccgcgatcacttgcagcgagcggtgcttggcgaatgtctgcccaagggatcgcgcggtatcggcatcctgttcggataaggatatggcttgcgtatcagtggctttggccgcgttgctggcgtcggcgttatcggacttgtcggccttgtccgtgctgttggacttggacgatgttgatgtcgaggaagtggtggtttcggcaatgcgattgctgatggccttattatcgacctgccagccgctggcggtgtagggcatggccacggtcaggttcatggccggtgttgtcgcggtgttgagcccatccgaagatcgggtcagaaaactcggcaaatcggcgagtatctgattgccaacgatatacgacagcatcagcggtttcggtccccaactccctatggaggcaagggtctgctgattggcgttcacctcgatggtgacggtggcagtgccgccggcgggaatcgatggcacgtcaacggaacccaactcgttgggggttgggatgggggcgttgttctcggcccaattctgaatatcggtgcgcgagacaaaggtgaacaacgcattggtggtcaggtgcagtgtgccgcttgacgtggccgtgctgtccgtattgctgatgaccgcggtgacacgatagcccgatttggaggtgacgatgggggtgctttgcgtgatggcaatgctctgcttgggctgattctcggtctgattgcccgttgcgtccgtcgtatcggatgaatcagtcgtgtccgtcgtatcgttcgcgtagacggtcaatggagcggccagcatcgccacaacggcgacgccagccgccagtgcgtgtgccagacgtgtgcaatgtcgtaagactccgggtaggttcactcgtttgcctgcctgttcttcttcctggcgtagagccacgcgattttgcgttcgttgggatagctcaacacgtcatccaaatcttcaaaacgcacccagatggcgtcttccgcctcatgatccgggtctccttccaccgtcagttcaccgccggtctgtttgagcgcgaagtgatggaccagtttgtgcacgcgctgcgtggtaccggtgaaccagtagtcgatggtggcgatggaatcgatcacctcgcccaggatgccggtctcttcatgcacttcgcgcacagcggtctgctgcggggtctcgcctttttcgatatgccccttcggcaagcaccattcgagatggccggagcgggaatgacgggcgataatggccacgcggttctggtcatcgaaaatcagaccgcctgccgaatattcgcgtacgaccggcagttcctgggcatccagtgaagcgaatgtggtcggaccgtccgacgtacggcgttgcggcatcatggccggagtcgggccggatggcgtcaccggttctaccggcactgccggttccggcgaggcaacatctccggacgggtgccggccgaagaccgtggccggcgtgggatgcgctgacgttgcgggcctcactggtgctgcagacggcgctgagaccggcatggtgaccggcgttgcggccggtgcggtacgtgccgcaggcggcatcagcacgtcgcgcggagtcggtatcgctgtggtgtgcgcggcggcggccttggcgaccgcaacggcagcatctacggccgcgtgagcggtcgccgcgggatcgttcgtgacgatggttacggacgtttgtgccgtggcgataatcggctcgacctcggcaatcgtctcggcaccggcctcgccggcgataccatcagcctgcccctcgatagtgccgctggtagtggcgatggtgacggtggcatgcatgccgaagacggtggccggtgtgggcatcatcggcttcggtgcgggcatgtcgctggcggcgtccgatatttcggattcggatggttcgggtgtggcgggcgttgcgggtgtgccaggcacaccggaatgttgcgcagtcggtactgcgtctacttcgtcttgatgaacggcctgattggtggagtggctcgcggtgccgccgacatcggaagaatcgcccgaatcggcggaatgatgcggagtttcggacgtatacagcaggtggtcttgggtatggctatccgccgaatctggtgtttgccccagcatgcgggcaaggtcggcgggcgtaatcatattctccaccttactcaaccccgtgtgcaggtggggtaacggtatgctggtagggcagaaaaacgtcgcacgcgggaaggtgcccattggatttcgaagtatggcctgaagccatcgaacttggtcgactgttcgccgaacagggttacgagctggcattggtcggcggcccggtcagggatttgctgctccatagaaagagccacgatttggacttctgctcatccgcacggcctgagcagttcgagccgatactgcgccggtgggggcatgacggcttctgggacatggggcgcaagttcggcacgctgggtgccatgcgccgccgcccggacggcaccgaggtcaaggtggaggtcaccacctatcgctctgacacgtacgatccggactcgcgtaagcccgaggtcaattatggcgacacgcttgagggcgacctgtcccgccgcgacttcaccgtcaacgcgatggctctgcgcgtgcccgacctgcaattcgtggacccgttcggtggtgccagtgatctgtccaagggcgtgttgcgcacgccggtggatccgcgacagtcctttgacgacgatccgttgcgtatgatgcgcgccgtgcgattcgtggcccagctgggcttccgtatcgcgccggacgcggccgaggcgattacctcgatgcgcgaccgcatcgacatcgtatccgccgagcgtgtgcgcgacgaactgaccaaactgctgctctccgaccgtccgcgcgccggccttgaggcgttggtcgaatccggtcttgcggacatcgtcttcccggaaattccggccctgcaattgcagatcgacgaacaccaccgccacaaggacgtcttcgagcacacgatgattgtgctcgaacgtgctatcgccctggaaaccggcccggacggcccggtgcccgcccccgacctgacgctgcgcttggccgccgtgatgcacgatatcggcaagccgaagacccgccggttcgagtcgggcggcaaggtgagcttccaccaccatgacgcggtgggtgccaaaatgacccgcaagcgtttgaaggcgctgcgttttgaccaccatctggtcgaggacgtctcggaactggtgaatatgcacctgcgcttccacggctatgtggacgagccgtggaccgattcggccgtacgccggtatgtcaaggatgccgggcacctctatgagcggctgaacaggctcacgcgtgcggatgccaccacacaaaacaaacgcaaggcgatgatcttctcccaggccatggatgagatggaggagcgcgtccgcgaactcaagaagaaagaggacttcgacgcgatccgcccggatctggacggcaacgaaattatggagttgctgggcctggagcccggcccgatgatcggccgcgcctacaagcacatgctggaataccgcttggataacggtccggtggaccacgatgtggccgtcgaagaactcaagcgctggtacgccgagattcagtagtccgatactagtccgataccaaaaaaccgtacgctgaatacgtgtcagcgtacggtttttcgcgaagatgaagctgtatgcgccttactgcgccgtgtatgcgtcgtgtttggtgtcggcgggcagcttggtcatgctatcggcggccttgcaaccctcgatattggtgatggtcttaccggattgcggggaggagttggtgtcctgcagatcgttgaacgtggcgccgatgaccacatcgatgagctgatcctcgcgagccgtcatgatcatggtggcgtcggtgaaattgccgatcagcgtatacgcctgattaatggcgttcttgccgaagtagatggtggtgcgttcaacgtcggtgctggaatagttatcgattttctgcacgctgaatccacgattggccaaagcttcacccacggccttggcgaattggccgtgagaggtgccgttcatcacgcgaatgccgaccgaagcgttggacacgtattgcgctttgccgctgctgtccttgaccgcgcacggcgccgcgttgccgtaattcggctggctggccggagtctccacttcgccgaggccgaaaacgtggaaattgaacagtagggctatgaccagcactactgccaataccgcgccgctgatggaaaagacgatggtctggcggcggcgcacgtacgccttgcgggcttcacgttcatcaacctgatacgtcatcggtggacttctttcatgggtcgggtggctggttgctaccttagcgtcactgtctgacgctgatattggggtgttcgggagatttggctcgaataatacgatcgaccacagctgtatcgcgccacacctcgataatgcgttgtgccgctgcctcgtcggcggcgaaagcgaccactgaggggccggatccggagacgaatgcatggctggcacccgcctgcgtggcggcgtcgatggcctgcccgctgcggggatgcaggctgattgccgcagcctgcagatgattgcggtcgccttctgcggctcccacgatgtcaaaggtgtggtagacctcaggagtgctgagttgcgactggtatgcgccgaccaatacttcgccgctgaatccctgttctatcagcgccagctcatcgcggctgccgggggcgatatccgtgatgcgttcgccgaaaccggtgccgtatgcaaggccaccggtcaggcagaacggcatgtccgcgcccaacgtggcagcaatggtgcgcaggcgctctatgggccagttcagctcccagagacgattgaccgccagcatggtcgccgcggcgtcggctgaaccgccgcctagtccggcacccacgggaatgcgcttggtgatggtcaacgccacatccggctcgcgctcggccgcctgggccatggcgaagagggccagtaccgcatggttgcggcgcatgtcgctgcgtgaggaggccaagtcgcccaaataagcgccttcgagctccagagagaatcctgctccgggttgcttggcggttgcggtgacggtgtcgtatacgccgattgcgcagtagatggtgtccagttcgtggcgtccgccccattcgtcgtgagcaggtcccacttccaaggtgagattggttttcgccgggcaatccaccgtaatggtgatgggggagagctcatcggactgatgtcgggcagcggctgagcgtggatgtgagattaccggactcattgtgcctcatctccatctccacacgattcgatggccttggccagagcggtgaattcggcgatggtgagcgtctctcctcgacgggtcggatcgatgccggcgatggagaatgcctcggagggcgcaatggtcttcaatgccgcgtgcagggtcttgcgacgctgaccgaatgccgcatcgatcagacgaaatacgagttcccgttgtgtgccgccgtcggccgtgctgttcgaggctcccggggcggccgggtcatcggcctgataccgggtgaatctgacgagcgcggaatccacattgggagccggccagaacacattgcggccgatggtgcccacccgttcggcggtgccataccaggcgagcttcacgctcggcgtgccgtagatcttggaaccgggcttggcggcgagtctgtcggccacctctttttgcaccatcaccaagaacgagccgaggttgtcgaaacgctccaacagcgtgagcagaatcggtgtggccacgttgtacggcagattggcgaccagcgtaaacgatgcgtcatcgctgaaatcaggcacgttctccggggtgacggttaaggcatcccgattgacgacggtgagtcgtgacgtggcttcgggcatgaattcggcgactgtgcccggcagtcgttcggccagcggcggatcgatttcgactgcggtcatggtggcgccggtttccagaatcgccaatgtcaacgatcccaggccggggccgacttccatgacatgatcggcagcggtcactcccgcctcgcgtacgatacgacggaccgtgccggggtcgatgacgaagttctgcccgaatttcttggtggggctgatgccggcatcggccgcgatacgacggatatcggcggcgcctaacaggtgaccggtggcgggaatggtgtcgttcataagcgtgtgttccttgtgggcttcgtaaccgatcagtaccaaccgatttgttcggaattttgccatgccttggacgggctgccgtatctttgtgcgatgtaccacagaccccaatcgatctgtacggcggcatcgtcacggtaattggcgccgaacgcagccattttgtctgctggtagcgactgaggaatgccgtaggcgccggagctcgcgttttcggcataccacagccatctggactcgcggttccatagtttgaccaggcaatcccagtcgttgcctgtccacccgcgctgcgcggcggcaccggcggcataggcctgagcctgggctacggtggcgtgccagagtcggccggagggcgtggtggttgttcctgaatcggagccggaagagccggaattgttgttcgtaccgccgccggtgttaccggtgttgccggagttgccggagttgccggtgttaccggtgttgccagtgttaccggaattgccggtgttgccggagttgttgccgccggtgttgccggaattgccggtgttgccggagttgttgccgccggtgttgccggcattgttgttggacgactcgtgctgattgttggaaccggaatcggccttgccgttatcggcggagtcggatttcttatcggaacctttatcggtatcagacttggcggcgcctacggcgatgatctggtcgatggccatcgaggtgacggtctccgatttcagcgtctccgattcggccacgccatccacataggtgacgtcgtacacctgcgtcttctcgccgttgacgccctgctggcgcacatcggcctgcccttcagccagattcgggtcgatgatggtctgggtggagaacggaatcacggacgtgcgcgtctcctcgccgtgggtcacgcggcgtacgcgcagaatggtctcgtcgctgtctttctcaacgctgacgcgatcctccttgttgagcacgatgcccttggaatcgaggatggaggcggccggcagcttgccattgggggccaccgagcttttgccgtcggcgatgacggtgaccggcccggactggttgatcaccaggccgccggtgagctggttgtacacgttcttgatgtcgacggtgatcttcgcggcgttgttctggttttcctcgaaaaatcccagtagctggtcggcgctggtggccacggtccagaacggcacggcggtgccgtcgatgttgatggtggtctggtaggcggactgtacggtgaccacggcatgattggcgagctggtcgccggacgaggtggtcacgatatcgtgggtcttgatatccaccccttgttcctccagaagacgggtggccgtcatcgcatatgtggtgacttgggtggtttgcccgttgatgttcagggctacggatttacgcgcggtgaacgcgaatgatccagccagcgcgatactggtcgccgcgatacaggcgattacgcggatgcgacgcagtgtaacaaaccgctgcggggtccaacgccgtgccattgccatactcttcctgctggatgaacgattacgccacccatcgtaacggttgttccggcccatactgcggtttcaccggccaccgtcaccattcctgctcgtcagattgttctgagctcaaaaaaagaaaagaaaaagggggcgggagagaaggggatgttcccgcccccctgaaggcgcggagctggttgggggacgctccgccctcattccaggaagcccatagttgggggaaggctcctggagtacttacccaaggtaagaattatatgcgtagaaaagtctacgtatcatataatacgccacttttctacgcgtcgagcctcttgtcgggatcgaaccgacgacctgccgcttacaaggcggccgctctggccatctgagctaaagaggcgattgttcttaacgcgtaaatcgttgcgaacaaatgactagtataccggtacttcccgagtggtcaatttaagccgagccgcaggcggtattgcatatgtcgcggcgtcaacttattcggccacgcagcatcaggaggcgaccgaaatcggctttccgctggcaccgatggatggcattttgccttccacgcctacctggtcagcatccagcccaatggacttgaggaagccgtccaccatattcgtgtccgccagcgtgagctgcttcagatcccagtattcgccgttgatggtgagtgtgggggaggagaaggcgccggagctgttgaacagttcggggcgcaggatcgtgtagttgttggaggcggtgagccagtcgaggtattcgttcttgccgctgaacgccgcggcggccacatcctcgctcacgccggccttgacggcctgcttctccagcttggcgttgtttaccggctcgtaattggacaattcgcccggctggaaatcctcagcgtagatgttggagaggtagctcatgaggtggtcgggatcgtcatcatgctcggcaatgtagatggcaccgttgaacacgcggttggagtagttgtcggagctcttgttgttctggaaattgaggaagtgcaaatcgatgttgagctggcctgcgttcatcagcttgacgagcgtcgggtcgagttggcggttcaccgaggcgcagccggggcacagcggttccatgtagatggatacggtgggagccccctcggctttctggccataccctttgttggagattacgaagccggccttgtcgtcggcgttagccggctgggtactgactttcttgagcttgctataggcctcgtccacggtcatgttgctttgctggctactgctgctggtgttggacggccgcatagccttgtatacggcgaatccagcgatggccaccagcaccacaataatggccaccacaatgcagccgatgatggtctgctgcttacgctccttggctgcctgctcggcccgtgcctgttgtgcggcctcctcggccgctcggcgctcagcgcgtgtggcacgcttggcctgacgcttcggatctgacatagctatccccttgcaatcgcttcaatgtttgggccccatcataatgaccgggcctgaggaggactgcgcccagagctgatctgaggtgaattccctgtaaaagtgtgacggaacgaacgtatcggatacacaacggccatgtgtgcggatggctgatgtgtgagattccgccccgctctaggcgaacggcatccagttgatcggcatgcccagaatcggcatcgcgcacaaggccacggtgatgatggcccatatggtgaacagcacggtgccgcgcccgccgcccttgggcgccggcgccactggagcaggtggagccccacccacttcggtggatggcgcgcccgccgggcgactgtgtttgagcccgcgcagtacgccgccccccagccgaatcatcatcgactgtgggacgaacacagtgaccagccagccgatggccatgaaaccgcccagcgccagcccggaagcggagaacggcacatcattgagcaacggcaccggaataccccaatccgcggtgaaataccaggagatggtgtgaacgggcagtgccagagccgcggtggccacggcggttcccgccatatagatgatgactagcagcagtatgcggggaatggccagcagcagggctttgaccagatgccagggaaaagtcgccacgcgaatccacgaatcggagtttttgcgctcgccgccgcgtttgccctcgcgctcaagctggggttcggtgttataggccagggtgagcagtagccacaacaacgcagtggccgcgatgatggccacgagcggagcatttgccgccagtgccgccagcggcgccgccagcaggatcaatggcagggtgccgcgctgcagatattcccctcgcttcacgtccaccggattgggcatgggaggattttggaccatggtttcggtgggggccgcttgggcggtttggtcgatgatgcgctgcaatgccgggcgaatggcggggtccaccgctgtgggctggttgcttgcgggatcccagctgctctgggcggtgccggacggggggaatgatgacggctgcggcgtggggagtacggtggtgcgctcggccagcggcgtggtttggtccggcatcggtgtggtcgcgccggtgagtacctgtgtgccggcgtcgtcggtgaaatcggcagcagcgtcgggcaacagttgcgtggcctgctccgcaccggctggcggacgtggcggcatatcggctaagggcagcgtggcggtagcggcgccagccggcgagaatacgacggtttcgccatcgccgttatcgcccttattgccggagaacacggccatggtgggagcctcagcggcttcctcggccgcgcgccagatggttcggggattattgcggtcaacgccgccggccgcgccaaaagggggcatcgcctccgcggcttcggcaacgatcgcagccggttgtccagccacggctcccgcggcgaacggtcccgcctgctcgccctgccaagcgttgggattcaacgcatccaaggcgatggcattcagcaattgatccggcgtgcaacgatccctgcgatccgggtccagtgcagaacggaaggcagccaatgtgccggccggtagtccggaaagattcgcgttgcccgaggcctcgcgctcaagtaccgccatcatcggcttggtgccgaacacaggcgcgccggttgcggcaaaagcgagcacggacgccaccgaccaccaatcggtggcgtcgtcggattcggcaccgtcaataatctcgggtgcgatgaatccgggtgtacccatcactaggccggtgcgggtcacgtgactttcgccctcgcccatcgcgataccgaaatcgaccaataccggtccggcggccgacaccatcacattggtgggtttgatgtcgcgatggacgatgccggccgcatgtacggctttggtggcttcgatgagcttgcgggccaagcgttccagatcgtcgcccacataccggccattggcggccacatcatccttaagattcttgccctcgatgagttcagtgacgatgaacgccaacgtatcgtcgagttccatatccacgatgccgcacacacccggatgattgaccttcttcaaggccatggcctcgcgccgcaggcgctcgcgcggcgtgacatcgggcttgaggtcggggtcgtgcagggccgtggacgcagagccggagcctgccactgactcgtcggtcagggagtcgcgcagaatcttcatggcataggtggtgccgccgtcgtcgcgcacccgccacaccgaccccatagctcctgagccgagccgggagatcagcgtatacccaccaaccacttcgccggactcaagattcaacgcgttcaaatcgctcatgccctccatcctaatgccttgctggtgcattattctggctctctcctgggaggccgagcttgatatttcttggctcccctctctgagaggggagccaagaataaatgccgtttacgtattgagaagtgccgtttacgccattaaggtcgattgccctgaccggatgtggtagcaaattatgcgctcgaaatgacaggataggtgcgtgggcaggtgcgccagtcgtgaatttgcgactctataaccatcggcatcaaggatgtgtcggcggtgacccaaaggtgagccagccgggcacattcaacagtggcacagcgatgcaagggcagtatcgtgagccgctgatcgaatcgataacgatatcagattcgaatgccgcgacttcgccggtcgtaccttcgaatacttctccgaagacggctacctgttcggcgtgatggcctcccagcaggtcgctgacgctccggtcaaggcctgaggtgtgtctccgataactgaatagctaaatagaatggacggcctgctgagcgctactcaacaggccgtccattgtgtatctgaatgcgaaaagtcattatatggaacggaatatatcgatactgtgcattgtgccgattactgattccgacgcaagtattcgcgcaggaagggcacggcaaaatcgacttcgcctcgttctgtttcgcggataacgaaggcgtcaaggaggcgtttgcggtaggtggcggcatagttaggcgttttgcccatgcgctgtgcaacattcacggtgggagagggaccatctgacgctgccatggcttcgagatactcacggtcgtttttggataagccttgcaactccgggatgcacacggcgttatcaaggtcaatacgtgcttcctcgatacctgccgtaacatcagcgtcgatgatggtatccgagtcccgcatgtctgcggcatcccagatatggtagccaaccagttgaatcatataggggtatccggctgtcacattggctgcagtgcttaattgagcgtcggtgatggacatgccggaggcgcggaatgttgtggcgaaagcatcgcgcacttcatcaagaggaatatctgtgagtatgttcgttttcgcgcgacgtaggaacgtgatgacttcgtcattgaacaaatcagaaatcatctgtgggagaccggcgaacacgatggcgatattgcgtcgttccctgatttgatgctgtatggcagtggcgatggcaatcatgtcggatcgctcagccgcttgagtctcatcaatggtgataagcaacccagcatggcgcttctcaagcgcatccaaccgtccggcaatggcacttctcaacgtttcgggcatacgcttcggggatagttcggcttctccgaggccgatgcccgctccagcaaaagtcaacgatggtcggatagtgaggtggtcaagggcccctcgcccggttcgtaaggcatcaacaaggcgttcgcatagtccggcagaggccgtttcttcgatgacatcccatctgcgcgctttggcccggtctccgaacacagtgagcatcacggtttttccggttccacgagcgccggtgacgagcataatgcgccctggggcaccgactccgttatcgagacctttctcgaaatcgcggataactttgcctcggccgatgagcaggggcggttcccctcctgccgttggcttgaatgggttttcctttgccttcatgtggaccgcctcctcgctgaatcaacctaaaataaaaattatcaaaaatatcaaaaaaataaaaattatcaaaagttgggttgagccgactgaagaaaacagccgtggcgacaatgattctgccgcaatccgcggtgacaacaactgacgcggaccttcttggcagaatcgttgtttgtcccgcttcgccaatcaacgtcgctcaagttcggtgcgcagaccggctaccgtagcggtcagctcacgcacttcctcgcgcaataggtcgatttcgggattggctgatgttgcaatagcctcttgcgcggcttccttggccacttccttctcccgagcgtcctcgcgccgatccgtctccagattgacctgatccacaatccacgaggccagcgtggccgtcacaataccgatcaacgcgatgccggtgaacatcagcaccaccgcaatgatcttgccttggaaggtgaccggcgagaagtcgccatatcccacggtggtcacggtcacgaacgcccaccacaacgccgtgccgaagtcggtgatcgtggatccggacgccccgcgctccacggaatacacggccagcgcgcccacgtacatgagcattcccaccgcgccgaccgcgtatacggtgatgcgcccgcgcaccgccatgccggaggtgcggttcagcacgtgcagcacggtcagcaaacgcaacagtcgcaagggccggagcatcggcagcgcgatggtcagcagcgtgaacaggttgtgcttgaaccaccgccagcgatcgtcggccaaccacagcgagaccacataatcgacgacgaacaccacccagatcacgttgatgacggtttcacacagcgcgatatgcgtgcgggagagaatttcccacgaatacaccaccagaaacaccacggacagcaccatcagcggccagtccgtccacttcttccacgtcttcagtcccatattccgattgtagtggcgcgcccgctgcgccactgcggagcatgactccggacgtcagtgttgtatacgttcgtatacatttcacgttgtgtacgaacgtatacaacggtatctttcatctcgcatttcccttatgactatcaccacagtgatataatcaagaatatgtaaggagagagagaaggagccggccaatggagaccgcatcgatcgaactgtggcatggctcttcgcatgtcatcaagcatcctgaatacgggctggtcaagccgaacaacgattatggccgcggattctattgcacgcgcagcgtcgagctggccaaggaatgggcgtgcgcgggactggatgacggtttcgcgaatcggtacacgttgaccacggacgggctcctcttcctggacctgtcccagccgccctacaccatcctgaactggctggccatgctggtcgaaaaccgtcgtttccagccgaccaccgccgtcgccgcgcaaggcatcgaatatctgaaacaagtgtttctgccggatgccagtcaggctgacgtcatcgtcggatatcgtgccgacgattcgtatttctcgttcgcccgcgcttttgtcaataacgcgatttccatcgaccaactcgctgaggcgatgcggttgggcgagctcggcaagcagatcgtactcgccagtcctcaggcattcgcggcactgcggttccaaggctgcgaaatcgcccgcgcttcgacctaccacggattgcgtaacgagcgcgaccgcacagctcgcgaagcctaccgccgcaaaagtgcagaagccgatctcgacggcctgttcatgcgcgacatcatccgcgagaaagtgaccaacgatgatccccgcctatgatgagacatacttgccggacgccatggccaacttggccggcgccttcgattatgcgctgaacgattgcgggttgccggtcggcctattcatggacttcttcgccacctccgaggcggccgcgcttttcgggcgaggcgcgcccaaatacgtgtgtggcatgtccggcgaggagctggtggccgaaatcatgcggcaaaccggttgggcgcgcattctcgatatgccgccagccgcactgcgcgccggctcaacacccgaatactgggccggatgggtactcgcatactgccaatgggccaggggagtgcggttctcggacattctcgatgtgctgtcgctcgacgatatcgtgcgactgcacccgactctgcacgaagccgacgaaagccgattcgtcgacgtgtacgacgagcgggccgcccataatcgcaccgagggcgactcccggctgcacacgatccgcgtgcgcgccggactcagccaatccgggctggcccgccgctccggcgttaccctgcgctccatccaaatgtacgagcagcgccgcaaagaccttggcaaagctgccgtctccaccgtgctcgctttggcccgcacgcttggctgccgcatcgaagatctgttggagccgtaaagacgcggagtagtatcgcgccgcatcgattctgataactgaacaactacttttaaggcccggccggatgctcgtttggacatccggccgggccttctggctccacacggggtgccgaggtatccgttctccgcttcgaggggctgatttggccttccgtagaggtttactcccgtttcgaggggctggtggcccgctagaacacgggtataaacggcttcgccccaccgtcattccgccattttggggatgcgcttacttgagtaccagcccctcgaaacggagatagatctccggaaagggtcaaaacagcccctcgaaactcaagatggcggttgcagggcggttgaggatcagtcgaagagcggttcaaacgcaaatgtgaacaatgccacatgtgattgggcgggtcgctgcacgccgattttcgggggtgcatgggaatggcggaatatcaacgaaaaaccctatatctaggtttgttatgtgacacgcgccactacatatagtgccttgatttcaaatcacaccgctgtaatatggccttcgcttcactgttcatcagaaccacatcaaggggagtcgccatgaccgtcaccgtgttcaccaagccgcattgcccgcagtgcgatgccaccaagcgccagctcaccaagctgggtgtgccgtttgaaaccgtggacctgacgcagaacccctccacccttgagcagctgcaggccgccggtttccagcaggctccggtggtcatcacgccggacaactcctggaccggctaccgccccgacctgattcgcgaagtcgcccagcaggtggccgccgacaaccgcgccgccgccacggtgtccgcgtgagtctgagccagcccgaattcgcggccgaaggcaagacgatcggcgcattggtctacttctcgtcggcctccgaaaacaccgcacggttcgtggccggatgccgtttgcaggacgaaggcatcaacgtctaccgcatcccgttgcgggccgccgccccggcgctaaacgtccgcgaaccgtacgtcatcatggtgcccacctatggcggcggcgtggtcaagaaagcagtgccgattcaggtcaaacgcttcctcaacgatccagccaaccgcgagtggattcgcggcgtcatcgcctcaggcaacaccaatttcggtgaggcctactgtgccgccggagacatcatcgccgccaaatgcaaggtgccctacctctaccgttacgaactcatgggcaccccggaagacactgccgccgtgcgaaacggcctcgtccgcttcttcaccgaacagtaaatcttgaccccctcgaggtattggctcccctctccgaggggagctgtcaacgaagttgactgaggggagcaactgtctgagtaaacacacttctgccatattccaaggatttccaatgactgacctcaccgccaccggcctgccgctcgacaatactgccgacaccgcagcggaacagtacgacccggcgcacgattaccacgcgctcaacgcgatgctcaacctctatgacgccgacggcaagatccagttcgacaaagacaaggccgccgaacgcgaatacgtgacagggcacgtggccaccaacagcaagcggttcgcctccaccgccgagcgtctcgaatacctgatcagcaaccagtactacaaccctgcggtcttcaaccagtactccgctgaattcctcgaccgcatctacgagcacgtggaatccgccggctttgagttcggcactttccttggtgcgttcaagttctacacgtcctacgcgctcaagacgttcgatggtcgcctctatcttgaggacttcccgcagcgttgcgccgctgtggccctggagctcgccgccggcaatgagcagcaggccatcgaatacgccgacgaaatgcttgccggccgcttccagcccgccaccccgaccttcctgaacctcggcaaggcccagcgtggcgaaccggtcagctgcttcctggtgcgcatcgaagacaacatggagtcgatttcgcgcggcatcaacgcggccctccagctctccaagcgcggcggtggcgtggccctgctgctgagcaacctgcgcgagctcggcgccccgatcaagcacatcgagaaccagtccagcggcgtgattccggtcatgaagctgctggaggactccttctcctatgccaaccagctcggcgcacgtcagggcgcgggcgcggtgtacctcaacgcccaccaccctgatatcctgcgcttcctggataccaagcgagagaacgcggacgagaagatccgcatcaagtcgctggctcttggcgtggtgattccggacatcacgttcgaactggccaaacagaaggcccagatggccctgttcagcccgtacgacgtggagcgcgtgtacggcaagccgttcgccgacatctccgttaccgagcattatgacgagatggtggccgacgaccgcatcaagaagacctacatcgacgcccgtaagttcttcaccaccatcgccgaactgcagttcgaatccggctacccgtacatcgtgttcgaggacacggtcaaccgcgcgaacccgatcgaaggtcgcgtgaccatgtccaacctgtgctcggaaatcctgcaggttcaggagccgagcgcatacaacgaggacctcacgtatgcgcatgtcggccgcgacatctcctgcaatctaggttcgctcaacatcgctaaggcgatggatggcggcttgggccacacggtggagacggcgatccgcgcactcacctcggtggccgagcacaccagcatcaacgcggtgccttcgattcgccgcgccaatgaggagggccacgccatcggtctcggccagatgaacctgcacggcttcctggcccgcgaaggcatccagtacggttctgaagagggcctcgacttcaccgacatgtacttcatgaccgtggcctaccacgcctaccgtgcctcgcacgcgctcgccgtggagcatggccgcacgttcgccagcttcgctacgagcgactacgccaagccggccggccagggcaactacttcgacaagtacaccgatggtcgtcgttcgctcactccgcgcaccgaacgggtccgtgcgctgttcgaacagtacggcatcgcgatcccgactgcggccgactgggaggccctgcgcgacgcgattctgaaggacggcatctacaaccagaacctgcaggccgtgccgcccaccggctcgatctcgtacatcaaccattccacgagctcgattcacccgatcgcctccaagatcgagattcgcaaggaaggcaagatcgggcgcgtgtactacccggccgcctacatgaccaacgacaacctcgggtactacaaggacgcctacgagatcggctggaaggccatcgtcgacacgtacgccgaggccacccagcacgtggatcagggactgtcgctgacgctgttcttcccggacaccgccaccacccgcgacctcaataaggcccagatctacgcctggcgcaagggcatcaaaaccctctactacatccgcatccgccagcaagccctggaaggcactgaagtccaaggctgcgtctcctgcatgctctgatcgttcgagggagcgtataccgcctttcttcggcactcgacgtaccttcgtacgccttcggcctcagacggcggtctccgcacgcattgaacaaccagagagccgttgttactcccctcactcggctaacgccgacagctcccctcagagaggggagctggccgcgaagcggactgagggggggctccaccatctaaggaaccaacaatgtcacgaaccgtctatagagcactgctccggctgaccgcgccggaggagttcgaaaacaaatccaacgacgataacgacaacgagtaaaaggaacactactcatggcacctatctccattccgcgcaaaccgctgaaactcatcgaccgcgtctccgcaatcaactggaaccgcctcgaagacgagaaagaccttgaggtctgggaccgcctgaccggcaacttctggctgcccgaaaaagtccccgtctccaacgacatccccagctggcagaagatgaccgaggacgagcacacgctcaccatgcgcgtcttcaccggcctgaccctgcttgacaccatccagggcacggtcggcgccgtctccctgattccggacgcgctcaccccgcacgaggaggccgtgtacaccaacatcgccttcatggaatccgtgcacgccaaaagctactcgtccatcttctccaccctgtgctccaccgaacagatcgatgccgcattcgactggagcgagaacaatgagttcctgcagaagaaggcggagatcgtgctcgactactacgagggcgacaacccgtacaagcgcaaggtggcctccaccctgctcgagtccttcctcttctactccggcttctatctgccgatgtacttctccgcgcacgccaagctgacgaacaccgccgacgtgattcgtctgatcatccgcgatgaggccgtccacggctactacatcggctacaagtaccagaagggcatcgcccagctgagcgatgccgagcgtctggatctgcaggactacacgtacgacctgctcaacgagctgtacgacaacgaagtggagtacacccagtcgctgtacgactgcgtgggcctgaccgatgacgtcgagaagttcctgcggtacaacggtaacaaggcgctgatgaacctcggctacccggctttgttcccggctgagatttgcgatgtgaaccccgcgatcctggccgccctgagcccgaacgccgacgaaaaccacgacttcttctccggctccggctcctcctacgtgatgggcaaagccgaagaaaccgatgacgacgactgggacttctaagggtttcgcggtccgcgaacccgcagcgccgccgcgttcgtgcggcggcgctacgctggagatatggaacaggatccgttggtcagcatcattattccggtgtataaggtcgagaagttcctcgacgaatgcgtggcgtccgttgctgcgcagacgtacgccaatctggagattctgctggtcgacgacggctcgcccgacaattgcccggccatgtgcgacgcctgggccgcccgcgacccgcgcatacgcgtgattcacaagcccaacggcggcctgtccgacgcccgcaactccggtatcgctgaggctatcggcgcgtacatatacttcgccgattccgacgacaccgtggcacccacgttggtggaggactgtctgaacgccatgcgtgaatacgatgccgatctggtgatgttccagttcgacaccatctccgagaacaacaagccgctgctgtccaactatcgccacaacgacttcaccgaggtgcaggttctgaccccggtcgaggccatcaaaaagcaggtcaaggctgagatcgacggctatttctgggccttcctggcacccgcctccacctatcagggcaccggattctccttcccggtggggcgcaaaatcgaggatctctcccgtatctgcaacgtgatcggcgaggccacgcgcgtggtccgtctgcccaaggcgctgtaccactaccgcatgcgcgagggatcgattaccgccaactgggatccgcagctcacccgcgactggacccgcgccgccgacgaccgcgaggaatacatcgtccaccgattccccgagctcaagggcttcatgacgctgcaacagctgaatttctttgccaacctcgattacgagaccatgcgccagtcgctgatcgccgggcttaagatcgatcccgaggacgccgacgcgcttcgtcgtcgcatcgagggcctgaccaagtccgccgatgagggcgatgagcccgtaccggaaacgttgcgtgagttgctcggactgctcaagctgggcatcaccaaggtggccgatggcacgttcggtaaggccgatggcagcggtactgatgacgatgccgagaacgatgacgtaacgctggccgaccgtttccgcgacatgcgcgaggactggcgccagctgcgcatccagcgcatcgaaaacgccgaggagcgcaaggccgagcgcaaagccgcccgcaacggcgtcaccttcgagtctgtgttgcattagtcggcgactgatggaatccgtcagttcgggaagagcaggcctgctctacgccgggcgtgccggttcgcacgttcgagaaacaggcgtgtcatgggccgaaccacacaacacccccagaaacgcccataaagttaactacattttcagacacgccacttgccttggtccacggtccgtgtatagtagttctcggctcaacgaagagaaccttcactgaaccggaaaaaagtaaacgctgaagcttgcagtttccgaaagcaaagttctacgtcggtggcgagggcggaagcgcagtaaagaacaaatccctttacaacggatcgtgaggcacgtacctgcctctgaaaggattagtaattatggcagaagtcgttttcgaccacgtcactcgtatctacccgggcaacgataagccctccgtggatgatctgaatcttgatatcaaggatggcgagttcctcgtcctcgtcggcccttctggctgtggtaagtctacgacccttcgtatgctcgccggcctggaagaggtcaacaagggccgcatcctcatcggtggcaaggatgtcaccacgatgcagccgaaggaccgcgacatcgcaatggtgttccagaactacgctctgtacccgcacatgaccgttgccgacaacatgggcttcgccctgaagatcgccggcactccgaaggacgagattcgcaagcgcgtcgagaaggccgctgagattctcgacctgaccgagtacctcgaccgcaagccgaaggctctgtccggtggtcagcgtcagcgtgtggccatgggtcgtgcaatcgtccgtgagccgaaggtcttcctcatggatgagccgctgtccaacctcgacgccaagctccgtgtccagacccgtacccagatcgctgctctgcagcgccagctgggtgtcaccaccctgtacgtgacccacgatcagaccgaggccctgacgatgggcgatcgcatcgccgtcatcaagctcggtatcctgcagcaggtcggcgccccgaccgagctgtacgatcgcccggccaacgtcttcgtcgccggcttcatcggctccccgtcgatgaacctgaacacccacccggtggtcaacggcaaggcgaagatcggtgaggacaccgtggacctgccggctgaggccgtcaacaagctcaccgccgaagacaacggccagatcgtggtcggcttccgtcctgaggacgctggcctggccccggctgacgacccgaacgccttctccctgaaggttgtgaacgtcgaggatctgggctccgatggctacatctacggcaacatcatcaccgatggctccgccgctgaggcttcccaggtcatgtccgaccagaacaagctcaccacgattcgtgtgaatccgcgtgcgctgccgaaggttggcgcgaccgtcaagatcaagatcgacccggccaagatgcacctgttcgctccgtcgactgagctgcgtctgaactaatagatacttggcgaggtctaatcgcttcgtcaaccattaaacgaggttattctcttcctctcttatgacctcgttggaaaagccctgcacagctgcggggcttttctttttgcctagaaaacgtacgctaactgacctcgcaaatgaacgttttttgttcttttgtcaacttcttcctagaaagatggtatgattatatgcagtaacccccgaaaagaggattgcgaatctatgaggggaaacagtgagctcgaaattgaagttcgtccgttgcgggtttaacggaggaacagaacaggaatctggacggcagagccatgccttgaagcgttgccttgcttcggttattgctgtttccttgtccatcgtgtgcatggtgcctgcagcatatgctcagaatatagacgatgtgagtagctctcctaatgccgtaatttctgagggggggggggtaatactgtcgtagctgctccttctgctcgcaatgtcaacgttgacgataagacgtcagaagagggcaatacatcaaacggtgcgccagcaccttctgaaacgaatcaagacgcacagcaggattcatctccttcatcttctactactggtgattcttccgaatcctcaaatggtgaggcaggcaacaaggcggatgccgcagcaggggctgctgctggcgattccgctaatgacggaacccaaacgcaggctccgactgatacttcttctcaaggtgccaagaacgattcttcgactgaggcggatcaatcgccggcgaaggccaatgtgcaggtcgccgcgacggcgcttggcggccgtgactttgaaggtcaggtcaccaaggagatcaacggcaagacctacatcctgatcggcaacgagcagcagctgcgtgcgattggttccggcaagaaggttattggccgtatcaacaaggtcaagcagacctgcaccgggcaaggactctctggctaccactgggtagatggcgcgtcgtccactgaatacgccggtgacgccgatcttgccgattcggataccttgcgcaatgctgatgcctccgactatgacaattcgctggcgatatgtcgtacgaaagtggacgctgataagacccgcaccaggtattacggcgtgggtgctgatggtacgcaagcggactactctgccgccaacactggtctgacatattcggccgatgcgaattatctgatcttccgtgacatcgatttgtccaagaacgcggcggataccgccagtactgagtggactccgctcatgttctccggcaccatgctcggcgcggtctccaacagcgcagacgctgtggctagcctgtggaaggctgtcggcgcggatggcgcaagcgtggagcataccacagcagctcggccggtcatcagccatgtggtcgtcaatcaacagggcaagcagctggacgtcagcaagcagcagggcatcggcttcttcgcctcgatcacgaacaagaccgtgatgaacagcaacagtctgggcagcgccggtacggccgtggtgtcgaacctcaagctgcaggatgtgtcggtggcgaatcatacgagtgaatcgtatattccggagaccttgctcgatatgctcatttcggcagtgggtggacttttggatcttctgcttgaggcgttgaaactgctgacattcggacaagtagatcttggcctcaatcttcgaggtctgctcaccctgcacaaagacaatccctccaatctcgccacgggtgcgttcgccggccgtatttacggcgatgccaaggtcacggattgtgaagtggcggatgtttcggtatccagcgtaagccgtatgaccggtggtttcgtgggatatgttgagggcgcaacccgatacgatgcggtctccggcatcgtgggaacgctcaccaatgtactctcgaagatcttgggtgtcatcccattcctcgggctgggcgatttggtgaactggttgctgtccggcacgctcggactgaatgccttgattccggtcggctactacaacccggtcatctcgaacagttcggtgaacgggttcaaaaagaacgtggtgatcggcaacaagaataatccgcaagccggcggcttcgtcggtgcacagattggcgcaatcatcgagaactcctcggtgacgagcacgaacggtttcaccgtgcgggcaacgcaatacgccggtggcttcgccggaataagccgcaatggcaatgtaggtggtctgctcaactcgcttggtattgatttgctgtctgcactgcgtccgcagagcctcatcgagaacagcaacctgaccgtcgacggtgatggcaaggtcactgtatctgccacggactatgccggtggatttagcggcgcgatggccaatgcctacgcggtcaataatacgatttcagccacggctgccgtgtctactgacaaatcccacgccggaggattcaccggatttgcctccgtgggatggggcctagaactcggcacggatgatgccacgaacgcatcgctgctgaaacaactcaccaaggctgtggccaagctgctgagcggcagcggtagtggtgcgggagaactgctgtccatcgttggcgtgaatccctccgtgattctcggcacgcagatgaagggctccttcaccgttaaggctggtggcgattacgcgggcggtctcgtgggagaaggatcgggcacggtgatcggcgactcctcgcaggatcatctgcagaacctcacgttctggaaatacaacaatccccgtgggctccctcagcagcgctccactgccatcaacggtcttgaatcagtcagcgccggcggctcctacgcgggcggcatcgccggcaatctgcaaccgaccacagtggctgggttgctcaacagtgtggtgaaaattggcgatatcgccacgctcaagaagttcgaccagtttgccccgttcaccgtggagaacgtgactgttgctgccccggcatccggcttgacagtgacggctggctcatactatgcgggcggtgccatcggatgcgccaccggtggtgacgtgaccaacacgaaccttaccaatctggccacggtcacggccaagggagaagccggcggtttcatcggcttctccggaccaggcgacgccgttggcgccggcggccttaatgtgcttgggcttatcaagctttccggtctgctatcggttgcccaatattcttcggttgcagtcacttcatcgaatgtgaacggcatcgccaacggattcacggtcaaggcgaccggcaagaacgagaacaacgagaccaccgattacgctgcgggcggcttctacggtcaggccaacagcaccaagacccgcgaaagccatgtgacgaacctcaagtcggtcacggccgataccagcacatccgatggcatagcgggtggcttcgtgggcttctccaccaccggtggcctcgccgacgcgctcagcaacgccgatgattccagcgtgttggacaacctcatcaagggcggactgctgtccgtgaacgacctgctcggtgccatgccgtatctgattccaagctatacggataccactgtgtcgtatgtcaacggtggttacgtcgaaggtgatatcgcgggaggctatgcgggaaacttccaaagcggcaaagtcaatcagttctccgaaaccgatctcaagaacgacccaacgctggcaggcgtgcagtcccgcgttcaagccaaccccgtggccgttgtcaacctcgaccatgtgaccggcggcgcatacgcaggcggtttcggcggcaaggtcgtttccggcgcactcgcttcggctggcaacggcggcctgagcctgctcggcaaattcggtacggtggatctcgccaacctgctgcaggtggtgcagggctatgtgccgttcatctcctacgcgggcgtgcattccgatgccaccaccgtggagaccaccagcggcaacaagatttccgacccggatgatcccggcttcaccgtctccgcaacccgacttgaccaatccgatacgcaatccggttccgctggcggctacatcggctacggttccggcgtgcaggtatcccattccagcgtgacccaactgcgccacaccgatgtcaaggcaccgaagaatctggaaaccaccggatccatcgacgacacctatctgagcaaagacagctcgtatgcagtcaccgccgctcggtatgccggcggctacatcggcaaaatggacatcggctcggcagcagccgtgggcggcggcttgagcctgctcggccagaacgtcaatctcaacgacgtgctggatgtgctcaacattgtcgtttcgaccatcgagcactccgacgtgaccggcggcatcggcggatactccgtgctggccagcaccgcagaccataggaacgccaacaacaagcccgatccactgggcatggccggcggcttcgccggagacatcgaaggcggccatatccaggactccagctcgcacgagttcgtgtacatcatcggccaggtatcggccggcggctacgtgggcaccatgcagccgggagccgtggcgaacgtactcggcgacggcagcgtgctcaagaagctcgtcaacctcgacaacctgctctcgctcgtgcaggacttcgtgccgacgattcgcaacagctcaaccgatgccgcagtgtgcggcggcgcggtgcgcgcacaggcggcatcggatacaaccacacgccgcggcatggccggcggctatgcaggtcgtaaccgcggcggccatatctggggcaacaacaccgcagcatggaagcaggagaacaccgacggcaaatacaacgggccgcaacgcgtagcctatgccgcgcgcatccgcagcgtatacggtgccgaaatcgccggcggctacaccggcttcatggacgcggccgataccgctgaaggcggttcgctctccttgctcggcggtctcatcaaggccggcaacctcgccggcgtgctgtccgtggtctatccgactgaggagcacacgaaggtcaccggtccgctgcgcaatatgagctatgaccagtggaagacctgggtcgataatatcggcaagtacggtgcgtatggcaaggaattcaccgaggtagctacgggcgacggtgcgggttccgttaccgaccaggagtccttggataagttcctcgaatcctacatcttcggattcaacgtcgtcgccggtcgtgcggagtatcggactggcgcgaacctgcatgattccggcgtcgccggcggacacgtcggtctgatgcgcaccggtacgatcaccgatggccagtcgatggatgtcaagaccgtttcggctatgcgcgcggcgggcggctacgcgggcacgatagaatccggctcggcatcctcgttcggctccatccaactattcggagacaaaggcatcaagtttgatctgggtcagatgctcgacgtggcacaggtattcgtgcctgtcatcaaatcctcgagcgtggccggctaccgcaagggtatgaaaatcacggccgccggcgaagacatcacgcacggcaccggcaatgccggtggttacgtgggtctcgcggttggcggccagatttggggcgatcttgatcagaacggccagaagcttgctgatggtgtcaccgctgccggtgccaacgtctccaacctgcgcaaggtggaaggacgcaacaatgtcggcggattcatcggcgtggccactgccggtgcggtcgcagatgtggataccaatgcatccgagggattcctacaaggaatcctcgactcgctggtatcgaacccggcaagtctggtcagcgtattgcaggccacggttacgacgattcgcggtgcgcatgtgagctcggatgacccggcatggggatacacggtcgacggcgcatatgagagcaaggacgataagggtaataccacaaccaagtatgccctgaacgccggcggtttcgccggctcgctgcaggccgcgatcctcggtgacaaggattccgccaagggcaccggcagtgaagtggatactgccaaggactcagccgcgcttacagtcaccgggttgcgcgccgttgaaagtggacaatacgcgggcggcttcttcggccttgccgatgtgtccagcgtcgcctccgtcggcggcggcgaagctggcaaggaccagaacaccaacctgctgctcaaactgctcaaggtcggcaacgtgggtgtgctcgaagcgttccgcaccttcatctacgacggtcaggtcaacggcgtgagcgacggcatccagattgtcgcccatgattccaccacaaagggcatgcttgactcgaagcgttacaccggtgcggccggtggcttcggcggtggactgatcaatggctctgtcaagcagtccgcggtcaccaacctcaacagtgtgaccggcgtgaactacgtgggcggcttcatcgggcatcttggcaaatccggcacggtcgctgccgacaacgcacaactcggcacggatgcgctcaatctgctcggtgccacggccggcgtacttgacatctggggctcgcacgttggcgattcacatgtcaccggcattccggacggctacaccgtcaccgccacacaccatggcgacgattacggcaaagccaccgacaaggccactggacgcgaggtcgcgggcggattcgtcggctacgcggacctggcccgagtaaagggctgcacggccggcaatctcaagaaggtcaccagcggcgagatcgccggcggattcgtcggcgaaaccagccgcgcctatctggtcgatacgcaggtcaactcggtactcgtggaactgctcctgcaagtagtgaacgcgctggtcaagctcctatacctcgacaaggcgcagcaggtcggcgtcatcgacttgggcaagtggttcccgactatcttcggcaaggtattcgacctcaaggtgctctcggaaggcgatgtgctgtacgtgaacctgttcgggctgaaggtgagcgtcgccctgtccaaggccgacgccgaaaaccagcagcagaccgacgtggcgatcgtcaccatcggcgacagcgtcatcaaactgccctgcagcaaggacggcatcgacatggatgggtcaggtagcaacctgaccgtccaactcatcaagggcaaccgcacccgcgtggaacagtccaccgtgacgggcatcgccagcggctatgacgtgttcggtggtggagcgactcaggataccgacggcatgaaagacctttccacaggctacgcgggcggtttcgccggactgaacgacgagggcgtgctggcagacgaccacatggtctacgccgacacgatccgcggcaccagcggactggtcgacccgttctcgaacaccaaactcaagtccgtatgggacttcaacaccatgagcgacatcctcggaccggtcgatgaaggcaacggcggcaaggcatacaacacctatcgcatctaccgcaaggcggccgcgaacgccggtgaggcccgcacctccgcacaggacggcaacaagatcttctcgcagaagaacacggcagacgatgcgctgaacaccggactcgatcgttgggaagtgaagctgttcgacgtggtcaacacatacgacagcggcgctgtgcacagtggtgcatccggcgacgctggtaccacatgggttggcatcaaggatgccgtggccgaatccaaggacggccagacgaagctcgatgcctaccagtccccggccaaggcagtgctcatgcttgacgtgcccgtatccgacaacaacggcggactcacccccgaaccggacgacggccaggacccgtgcggcaaggacggttgcaagaccgtggacctcaccctgcagaaagtgtggcgcaacggccagctggaacgccccgacgccatcgccctcgaggtgaccgccacgtacacgaatgcggcgggcgaacaggtcaaggccgggaagctcgaatgcttcaaggacgactgcgccaccgaggagcgggccaacccgttcacggtgaccatgaccgccaaggagaacggctccgcgtggagcgacacgtggcgcacgaagctcaccggcctgccggtcgccttcgtcgacaagggttccggcccgaacggcgaggacgtgacgcgctactacacgtacaccgtcaaggagctcaacatgacctacgcctccggcgacacggatggcaacgctgagacgaagaccccagccgaggccggttactcggtgtccgtcaagtacggaacggacaaggacggcaagtatgtggccaccgtcacgaacttctcgcccctgcccgagaccggcggcaacggcacgctcctgttcgtcatgctcggcgtgttcatgctcgccctcggcaccgcatggtacctgcgcgccaaccgcatggaaccggccgcggccgggggagcgggcgcgggaaccgcattgccggtcggccgcaaacgcggtcggcacacccgataaccagacttcccgccgtcgcacggcggcggggcaaccaatgtaaccaactcgaaccggccccgaccgggaccggtgcagtacagagaaaggaacagtgatgaagtcactaatcaggaaagtagctgcgggcgtcctcgcagccgccacgatgctcggcatcgccggcctcggcgccaccaccgcctccgcggaagatgctaccggcacgctgaccgtcaccagctcggatgccgcgttcaacggcaagaaggtgaacgcctaccagatgttctccgcttccccggatgccgcaggccagaacgccacctacacgctggcctccccctgggacaatttcttcaagactaatgcggacgagcttggtatcacgggtgtgaccgatgccaacgtctccgaaaaggcctacgactacgtatacagcctgaatcagcaggacatgaaactggccgagttcgccaccaaggcttccaactgggccaagaaggctggcaacaatgtctctgcggtgaatcctgcagcgacggcgaaggcctccggtagccaatacgtcgctacttttgcgaacctcccgcttggctactacgtggtgagcccggaagccggttccacttccaacaagcgccacacggatgcgatgcttgtcaacgtcaccgccacgaccaagaacatcaatctgaagtccgaatacccgaccgtcgacaagaccatcgatgccgacaagaagggtgacagcgcccagatcggcagcaaggtgaacttccagctcaagtccaaggtcccggacacctccgaatacacgaactacgtcttcaagatcgtcgataccctttccgcggggcttgacttcaacaacgacgtcaccgtcaaggtcggtgatgctacgctgaccgctactactgattacagcgtgaccacgaaggggaagaccgtcaccatcgacctgtccaactacgtgaagaccgacaatgcgtccaaggctggcaaggggattctcgtcacctactccgcgactctgaacgagaacgcgttcgtcggcaccccggaccagaacaaccccggcaacctcaactccgccaaggtccagtacagcaacggccccagcgaggagaacatcggcgaatccaccccgtccgaaacccacagctacaccttcaacttcaacctgaagaagatttacaaggaaggcgacaccgaaaacgccctcgccggcgcgaagttccagctgctcgactccgacaagaccgtcatctctctcgtcaagaagagcgacaacgtgtatcgtccggccaagaccagcgatacggacgaggtcactgaagtggaaaccccggccaccggcatcatcgagttcaccggtctcaaggccggcacctactacctgaaggagaccttcgccccgaaggggtacaacaagctctccgatccggtcaaggtcaccatcaatgccaccatcaacaagaccaccggtgcgctggaatcctggacggtcaacggttccgctccgaccgccgatgtgactgtcccggtcgtcaagatcgagaacaagaagggtgcgctcctgccggataccggtggcatgggcactgtgctgttcaccgtgttcggcgtgctcatcgtggccctgggcgccggctggtacgtgaagtccaaccgcaagtcccgccacgcggcctgagcccacgtcacactggccctctccggcgcctcttcgacaaggagagccgagagggccgggcacgaggcgataggggagaggcccgccgtggccgggcgcacaagcgccaccagcccggcgccctccccgaaccatcgcctcgcgatccgccttccccagcgggaaggcccatgaaggagccctatggttaagaagctgcgcggcctcgcgccgttgctggtcatcgtgatcggactgctcgtcctgttctacccgacgatcagcaactttctcgtcatgaagaacgcctcgcgcgtcgtcagcaactacgacgcggccgtcgaggcactctccgacgaggaataccgcagcatgatcgacgccgcgcacgcctacaacaccagactcgccgaggaaagctccggcaccaccagcgccctcaccggagcggtgaacaccgaagccaccgacgccgagtacatgaagctcctcaacctcgccggcgacggcatgatgggatacatcactgtgcctaagctcaaggagaccctgcctatttatcacggcacttccgagaaagtactgcaatccggcatcggtcacttggaacagacctcactaccagttggtggcgcgtccactcatgcggcgctgtctggccaccgagggttgcccacggcaaaactgttcacggacttgaaccttatgaaaaaaggcgacaagttctatatcacaatacttaaagacacgtatgcgtatcaggtcgataagatcactaccgttctgccgactgatgccaaacaactggcgattgagcccggcaaggatttggtcacgctcattacctgcacaccgtatgcggtcaacacgcatcggctgctggtgcgcggtcatcgtattccatacacaccacagcagcagaatgacgccaaatccacattccacgtggacattccgctgcagtatttgttgccgtctctcgcgctgattgccttgcttattgcatggcatttgtggcagcggcatgagcggcgacgccggcagagtgggagcgccaaggtcgcatccggtgattctagctccacagccatcgagccggacggtgacttgcctcctcagccagccaatacaaataaccaatcacattcatcacggcggaaaggaccgggcagacatgttagacccgcatagcggaagcgagtatggtgcggcgcgcattgctgccatgattgccgccaccattactatcatcctcactggtcttgtgtctttcggcttcatggtgccatacgcgcaagctgattccttcggcactctcaccatcaatgccgtatggggccgagacacggcttcgcccaaatcacttgccggcgatacttatgccatcgtgcgcgtcgccactgtcacaacgaacaatgatggtagcgtttcctcatataaaaccgtcagtgatttttccggtctcactgccgattgggaacgcctgacatcgagcgaatatcacgatgccgccaagaagctggctgcacacgcggcgaaaaacaagctataccagcattccggcaccaccaatgcagctggccaacttactttccagaacctaccgcttggcctatatctggtctcccgcacggattcggcgaaagccaacaaggcatacgactgtgatccgttcctcatctcgattcccggcagcggagatacggccgccgatctcaacatcacggtagagccgaaattcagcaccagtactccgcccaccccgcctgaacacgaacacaacccaggagagatgccgggcaatcctggcgttatcggcaataccggtgccgccgtgggaggtatcgccggtgttgcggccgtcatacttgtcatcgcatttgccgtgttgaaactacgcgtgcgatatcgctccgatgataccgagtcatcacaccagttccgtgccgacggaggaaaagcatgacgcatagcaaggcctcgttctcatccgcacagataaaacgtctgatcaagctgcgggcggtggtgaaggtatcgccatcacgcatcaggtatgccgagtggttcaaacgggaatgcgtgatgcgcgccgatgccggcgaatcgcccacgtacctgttccgtgaggcgggactagggcctgagttcataggcgaaaaacgtattgaacgctgcatggaccgatggcggaagaaaatgcagctggaagatctggaagtggcaagcagcccggaacgcctgttttctgtggatatggacacggcgcaagacagagaagtcagcaaggtcgatgtgcgtgacgtgcgcgatctgatcatctgcaagcaaacacgttatatcgagagcctgcagcggcagatcgatgagctgcgtttgcagcttgcacagcaaaccaagtccaacgatatgcaatgagcggcatgggacgagttgaatcgtccgtaaacataacgcgccgaagtcgtggcaaaggagcacacatcgcgaacgacacgtaaaatcgaacacatggagttgaacgaattgccccagatggatccgcgtgcgctgaaggccacgtctgtcaaagccgaagacgaacacgccaattcagccgaaccgcaagcactgaaaatcaccgccgccagctcgaacccaaagatgttcacgctgccctggcacaagcccttggcgacctggcctaaggacctgctggccaacctgccgcgaggcatctcccgccacgtcgtgcgattcgtgcacgtgggcgacgaggtgtacgccatgaaggagatcacgcgccaggtggccgagcgagagtacgagatcctgcgtcgactgcagaagctcgaactgccaactgtgaccccgatcgctgtggtcatcggccgtcacacccgtgaaggggagccgctggaggcgattctggtcacccggcacttgaagttctcgctgccgtaccgtgcgttgttcgcccgcaacctgcgcccggacaccgccgaacgactgattgacgccctcgccgtgctgctggtgcgcctgcacctggccggcttctactggggcgatgtgtccctgtcgaacgtcctgttcctgcgcgacgccgacgctttctccgccttcctggtggacgccgagaccggtgacctgcaagcccagctcaccgacggccagcgcgaatacgatatcgacttggcccgcaccaacatcatcggcgaacttatggatttggcgtccggcaagctactgctcggcgacgtggatgagatcgaggtgggcaaccgcctggttgatcgctaccactcgctgtggagcgccctgaccgacaccgacaagttcaacccggacgaaatgtggaagatcgagcagcgcgtcaacaagctcaacgagctgggcttcgacgtggacgagctggaaatgaagaccgccgaggacggcaagcgtgtgctggtccgcccgcgcgtggtggacgccggctatgccaaccgcaagctgctgcgcctcaccggccttgacgtgcaggagaaccaggcccgtcgtctgctcaacgaccttgacgcctaccgtgcctccacgtggcgtgagggcgaggatctggaaatcgtggccaccgactggatgcgcgaggtgttcgagccgaccgtgcgtatgattccgcgcgaatatcgctcccagatcgagcctgctcagttcttccatgaggtgcttgaccatcgctggttcctggcggagaaggccggccacgacgtgccgatgggcgaggccgtgaccagctacatcgacaacgctctgccgagctacagccttgactccaaggcactcgccgaacttaacgaagaggccgattccggcgtcattgacgacgaatccacctacagcgacccggacgacgacggctacaaccccgatgacgatccggatgcggcagtgtggagtcattaagcggacaatccggtggactgtctgtaggtgagcccatcacacaaagaagcccctcaaatagaggggcttccgtgtatgtacaacctattacggcctcaagcgacaatcactccgccgcagccttgcgccgtgcgttggacaccgcgtacaggctgatacccgccgccactgaagcgttcagcgactcaacagacgagctgatcgggatgccggcaatcgcgtcgcaggtttcgcgcaccagtcggcccaaaccgctgccttccgaaccgagcactacaacgagcggatcggattcaaagccagtctcgccgacgagcttatcgccgccaccgtcaaggccgacaacgtagtatccacgctccttcaagccctcaagtgccttagtcaggttcaccacgcgcgccaccggcatatgcgcggccgcaccggcagacaccttccaagcggcggcgttcactgaagcggaacggcgttccggcagaatcacaccattggcaccgaatgcggccgccgaacgaatcacggcacccaggttctgcggatcggtcacgccgtccaatgcgataaacagcggtcgcgcagcaatacgggcggccgccgaattcgcggcctccattgccttggccttcttctcagcacgatcggccagctcgttcagcgaggagtactggaacggatcgaccttcagaatcacgccctgatggttgccagagcgggcgatacgatccatctccagacgatcggcctccagcatgtgcaggccgttcataccagcgattttcacgatttcgcgagtacgatcgtcatgttcaatacgagacatgatgtacagcgtggaagaaggtacgcctacgcgcagtgcttccagcacggaattacggccgtacaccagatccgaagtatccgccgaagcgaacttgtccactcgacggcgggctgccagacgcgggtcggccatctgccgacgttcggccgctttcttggccttgtacgccttgtgatagacgcggtcctcggccttgggagtggggccgtagcccttcagtttgttgcgatgcttgccacccgaccccttggtcggtccttttttgatagccataggtgctattgtcccagcaccccgcgccaaaacgcggctattccgccgtcggtagccggtaaggtattgagagtgaagaagcagcgtatgatattcggactgtccctgctgtattggggattatggttggcgattctgattctgtggatgggtcgcttcgtgacctcattcttgtcgatatatttggtttccgcgctgcgcctcgatgagggtgtggtgggcacagtcgtggccatgtacggcttcggcgcaatcatcggctgcctgttcggcggtaccttgtccgacagattcggccgccaatccatgattatcatcggcgaaatcggcgcagcggctgccctactggtcgtttccgtactcactgatcctgtgtctttaggcgcggctctgttcgtctatggtgcgttcgcctcgctgcccagcccggccatcgccgcgtatatcgcggatgtggtgcctgccgaacgtcagcaacgtgcatacgtactgcaatcgtgggcgattaattttgggtacgcgattggaccgattgtggccaaccagctggtcaagatctcgtattcgctgatgttctacgttgaagcggcggtgatgatagccgtcacgatattgctgattgcgttcttccgcgaggtgcggcatttggggattactgtatcggtgccaagtgcggtgcgccatgaagacgaatgcagtgttacccatgcggaattcgccggcattgagaggccgaatcactcggatgccgcaccggctgccagtgtcaagggcgccatgtctcgcaattggcggcgcgtgctcaccgatactccattcctcggcttctccctgctgatgttcggctacttccttgtgtacttccaaagcacctccggcctgcccattgccatgacggaccttggtctagggctgggcgagtattcggtgctgctcaccatcaatggcggtatgttgtgcctgctgcagattcccgcgatgaaactgttcgcgcgcatgggcaattcacgcgtgctggtgatgggcctcgccgtaaccgtcatcggctatgcggtgcaggccgcggcccattcttggggcggattcgcgcttgccgtagtgctgtggacgctgggtgagctgggcacattccctatcgccaccactacggttgccgccatggcacccgcgtcggcgcgcggcacgtatcagggcgtctacaacgtagtgtggtcggcgtcgattgcgctggcgccgctgattggtggctggactatcagcaacttcggcggtcgaacgctgtggatcgcctgcactgttgtgttgattgccgtgaccctcggtctcaagctcaccaaaggctcgcgcgaccgcgccatggcccgcagtcttcacgattcgctgtaagcgttattcggtttggagatacgggcaagaccgcatatggcgagtggttcttatcgagaactattctctgcgcgtatgatgtatggcatgcaatacattcaacaaaccatcgttggcattgatggcagcgaggcgcgattctttggctatgtggccgacaacagcgaggagatggaaccggaccgtatacgcccggctatcctgattttgcctggcggcggctacgccatgacttctgaccgcgaagccgagccagtggccctgcaattcctggccaaaggcttcgccgtattcgtgctgcgctattcggtgcagcccagccgctatccggtggctttgctggaggctgccgaggcaatgcgcctgattcgcgccaatgtggatcagtggcatgtaaaccccgcgcaagtggccgtactcggcttttccgcaggcgggcatctggccgccaacctcgccacctcggtcggcgacgaagacatccgcgaacagggcggcatggacccggacgccgtgcgcccgaacgcgctgatgctctcgtacccagtaatcaccgccggcaagtacgcccatcgcggcagcttccaatgcctgctaggggaccaagctcacaatcaggctttgctggacaagttctccatcgaaaagcacatcgacgccaaaacgccacccgtcttcgtctggcataccatgaccgacgacgccgtgcccgtggagaacacgctaatgctcatccaggcctgccgggccgccggcgtgagcattgaggcgcacctgttccctgaaggcagccacggcctgtccttggccaatgcggaaactgccggtaacggcttctatgcgcacatcgtcgaatgcgtgcagtgttggcctgatttggctgaggcctggttgcgtcgcctgttctaggcaaaacgctattacgctgtgcgccaagtgcgccacgcggttatggaataatggcaatcgtatgcatcggcagcagttgcgccggtgtccataaccgcgcagtcctgtgcgtccagccgggagagaaaacccggcagcggccgcaaggctgactactccgcggcaataccaaggagaacattatggatgatctcaaagatcaatccgcagtgtccacgaccgcaacgaacggggtcgtggaatcggaagaggtgcgcgcacaggaagcgctattgggggataccgatccaagtctgaccagcgccgacgacgtggccaaagccctgaacgtcgacccatcccacggcctgagcgaggaagaagccaagcgccgactggccaaattcggcccgaacgagctcgccagcgccccgcccgtaccgaaatggaagaaattcctggcccaattccaagatccgctggtctacctgctgatcgcggccactattatctcggtgatcgcttggttcatcgaaaaagccaatgcgcagcccggcgcggaaggcggcgaagtgctgccgttcgacgccatcgtgatcatcttgatcctgattgtcaatgctgtgctcggctatatgcaagaagccaaggccgaggcggccgtcgaagcgctcgcacaaatgacggccccgcagacctcggtgctgcgcgatggcaaggtcatgcgcatcaacaccgccgacgtggtccccggcgacatcatcgtccttgcggaaggcgattcggtctccgctgatggccgactggtcaacgcggccagcctgcgcatcgccgaggcttcactgaccggcgaatccgtgccggttggcaagaagccggacacactcaccgaagccaaggcgctgggcgaccgcgccaacatgatcttcaacggcacttccgtgacgcaaggcaccggccgcgcaatcgtgaccggcaccggtatgaatacgcaggtcggcaagatcgccgacatgctctccgccaccgaagatgagaaaactccgctgcagaaggagatggattacgtctccaagatcctcggcattgcggtgtgcgtcatcgctgtcgtggtgctggtggcgctcgccgtgctggaaggcttcaacgacgtccatgacgtgattgattccttgctgttggctgtctcgctggctgtggccgccgtgccggaaggcttggccgccatcctgaccgtggtgctggcgcttggtgtgcagcgtatggccgcgcacaacgccatcgtcaagaaactgcattcggtggagaccttgggctccgcttccgtgatctgctcggataagaccggtacgctgacccgcaacgagatgaccgtggaacgtgtggtcaccccgtccggcgaagtgcagatcactggcaccggttacgcgccggaaggccgcatggttatgaccggcggcgtcagtcctgaatccgagcaggcccagattgtggccgatgaagtcgtcgccacgctcgtggccggcacgctcgcgaacgacggcgaactacgcgaggagaacggccgttgggagattgtgggcgaccccaccgaagtctcgctgatcgtggccgcacgcaaggtcaaggccgatcgcaagatcaagcgatacacgcgcgttggcgagattccgttcacctccgaacgcaagcgcatgtccatcatcgccaaggacagcaccgattcagacaagctcaccgtgttcgccaagggcgcgcccgacgtgctgttgagctactgcacgcgcatccgcgtgggtggtcaggtccgtaagctcaccgaaggcgatcgccagtcgattctcgccaccgtcgaacgtctctcctccgaggcctaccgtacgcttggcgaggcctgccgtccgctggaaaccggttctttggctgatgtgcccggtgtaagcgtcaacgctgcaggccaggtgtccgacatcgccgatcaggccgaagccattgaaaccgatctcatctggaatggcatggtcggcattatcgatccgccgcgtactgaggtgcgcgactccgtgaccgaggcccatcgtgccggcatccgcacggtgatgatcaccggcgaccacccgctgaccgccgcccgcatcgcctccgaccttggcatcatcgccaaggatggcaaggccctgaccggcgaccagctcgaccagctgcccgatgaggccgcgctcgacaaggccacgtccgaagtgtccgtgtacgcgcgcgtggcccccgagcacaagctcaagatcgtcgaatccttgcagcgccaaggcaacatcgtggccatgaccggcgacggtgtgaacgatgccccggcagtcaagtccgcggacatcggcgtggccatgggcatcaccggcaccgaagtgaccaagcagagcgccaagatgattctggcggacgacaacttctccaccatcgtggccgccgtacgcgagggtcgcgtgatcttcgacaacatccgcaagttcctgcgctacctgctgagttccaatgtgggtgaggtgttcaccgtgttcctcggtgtggtgtttgccggcttcctcggcatccgccagccggaaaccgtgggcgtcaccgtgccgctgctcgccacacagttgctgtggatcaacctgctgaccgatgccgcgccggcgttggctatgggcgtggacccgcagaccgacgatgtgatgggtcgtaaaccgcgtaaggtgacggaccgcgtgattgacgcctccatgtggggcgacatcatctacatcggcgtcatcatggccatcgtcacgctgattggtatggacatgcacctgtccggcggcttgttcaccgaccgctcggtggatgccatcggccatgaagcgcagatgaccgaggcccgtacgatgggcttcacgattctggtgtttgcccagctattcaacgcgctgtcctcccgttcgcatctgcagtccgcattcgtgggtctgttctccaacaagtggctatggggtgcgattggtttgtccgtggcgctgcagctcgtggtgatttacgtgccgttcctcaacggtccgttcggcaccgtggcattgagcccgatggcttgggtggaatgcatctgcctggccgcaatcgtgctgattgcctccgaactgcgcaagattgtgctacgcgcgatggccaagcgttaagccatcgcaatagccctgattgtgggcatatagcagtgggccgggctctggtattcagagcccggcccactgctatatccaaacggctcctcatggggcggtaactatcccatggggcggtcgctgaaaacggcattattccgcgaaaaaggaaaatatgctaaccgccccatggggagttaccgccccatgggaaacaggagaacgctgcagacctcagttgttgctgccgtcagtgccgtcagtagaggtggagttgtcgccgccgttattgttgtcgctattgtgataacgcccgattttttgcgcactttcggattccgggtctgacgtaagagggcatggcccgcgtcctgtgtacgattttcattcgccaaaacaaaaaaccgcgattggaagccaggagacggaaccatgcccgagaacatcatacagatcgaccagaacctgctcgagaccaggctcgaccgcttggtcgccgaaaaggtcgccgagctattgaacgcgatgctcgacgccgaggccgacgagatcgccaacgccgccaagtacgagcgcaccggggagcggaaggcgtacagggccggccactacgaccggagcctgaccgccaaggccggcaggctcgcgttgaaggtgcccaaactcaagggcgcggtcttcgagtccgcggtcatcgaacgataccggagacgcgaggagagtgtcgaggaggccctcatcgacatgtacctggccggcgtgagcacccggcaggtggacgacatcagccaattgctgtggggcgacaggatgccgtcccagaccctgagcgacaagctcaagaaggtgtacggggagatcgaggcgtggcgcacgaggccgttggaggacgagtacccgtacgtgttcatggacggcgtgtggcacaagcgttcatggggcgggcacgtggagaacgtcagcgtcctggtcgccatcggagtcaacgcggaggggcaccgcgaggtgatcggcgtggccgagggcatgaaggaggacagggacagctgggagcagttcgtccgctccatgatcgaacgcggcctgaagggcgtgcgcctggtggtcggcgaccggtgcgccggactcgtcgccacggtcggctcgatgctgcccaaggcgagataccagcggtgcatggtgcatttcatgcgcaacgtgctctcgaagacgccgccgacacaccgcgaatgggcgtccgccgccctcaaggccatattcgccatggaatcccgggaatccgccctggccaaggccgaacaggtcgccacggagatggaatccaggaggctcaaggccgccgcgaactgcctgcgcgagggcgtcggcgagacgacgacctacctgctggacgagttcccggacgggcaccgcaggaggatccgcacgaacaacatgatcgagcggctgaacagggagatccgccggcgcacgcgcgtggtgggcggcttccccgacgggaacagcgcgttgatgctcatatgcgcccgcatccgtcacgtcaccgcgaacgaatggtcgacccgccgctatctcgacatgtcccggctcggtgacaacctcgtggaagcgaactgactatcgcgccatggacggccacgatccaaagtgcgcaacttttcgggcactacccaatatgatgattctcatattccagaaacaggtgcggcgcatgtaacgggcggtaggtagtctgaaggactgtaatgcaaagccgaacaggggagtgaagcatgtcgttggcggtacgagtcatcccgtgcctggacgttgacgccggtcgcgtggtgaagggtgtgcatttcgagaacctcaaggacgcgggtgacccggtggagctggcggccgaatactaccgtcagagagccgacgagatcaccttcctggatgtgaccgcatccagctcccaccgcaacacgatgattgacgtggtctcccgcaccgccgaacaggtgttcatcccaatgactgtgggcggcggcgtacgcacgcccgaggacgtcgactcactgctgcgctgcggtgcagacaaggtcggtgtcaacacggcggccatcaacgacccgtcgcttatcagccgtgtggccgatcgtttcggcaaccaggtgctggtgctctccgtggatgcccgccgcgaaaagggtgagcagcatacgcagtccggttttgaggtcaccacgatgggtggccgcaaatccaccggtattgatgccatctggtgggtcaagcgcgccgagcagcttggcgccggcgagattctgcttaactcgatggacgccgacggcaccaaggaaggctttgacctcgagatgattcgcgccgtgcgcaaggaagtcaagattccgatcatcgcctccggcggtgccggcaaggtcgaggacttcccgcccgccatcgaagcaggtgccgacgcggtgctggctgcatccgtgttccattacggcatcctgactatcgccgatgtcaaggcggaactcaagaagcacggctacaccgttcgctaaacgaatacaccttgctcccgctgggcgaacaatccagtgaattgttcgtggcaatgcgctatgcgcacgtcgcacataatccgggagctgtcagcgaagctgactgagggtggtccacaaaaagaagataggtatgacagacactacatacgacaattccactgaactcgatccccgtattgccgcacgcctgaagcgtgatgccaaggggctggtcgccgccgtcatccagcagtacgacacacgcgaggtgctgatggtcggctacatgaacgacgaggcattacgccgtacgctgaccaccggccgcgtgaccttctggtcccggtcccgtcaggaatactggcgcaagggtgatacctccggccatgtgcaatacgtcaagggcgtgtccctggattgcgacggcgacgcactgctcgtcgaagtcgaccaagtcggtgccgcctgccacaccggcaagcgcagctgcttcctcgaaggcggccccctgcccgtggtcgaaggccatcgcccggccgagcagtagaacgggctttcctgactgggggaagccgagcgaccgcgtactatgaaacaagacatcgagttgtaagcaaaggagcgaatatgagcgaatgcagcgtcaaacacctgaagtggggcgccacctggcccagtcgcgaacagttccacgaactggccgacgccggataccgtgtgattccgattgtgcgccgtctgctcgccgactcgctcaccccggtcggcttctacgagcgtctcgccggcggccgatccggcaccttcatcctcgaatcggcggaatacggcggcacgtggagccgttacagttttatcggcgtcaactcgatggcccagctgcgctccaacaacggtcaggccgactggctgggcaaggtcccggtcggcgtgcccgtcaccggtgacgtagtcgaagtcgctcacgccacgttgaagactctgaaggccccgcatgtggaaggcctgccgaacctgaccagcggtctggtcggcacggtcggctgggatgccatccgccactgggaaccgaccctgcgcgccgaagctccggacgagaccggccagcctgagaccgtgcttgccctggccaccgatatcgccgtggtcgaccacgtatccggttcggtatggctcatcgccaatgcggtgaatgtggatgataaatccactcgcgccgacgctgcctacaacgaggccgtcgctcgactcgaccagatgcagcgcgatgccgccaccccggctccggacgagtctcgcgtcaacatcctggacgaaacggtcgcccaacccgagctgcgcttccgcaccgagaagagccactacgagcaggccgtcgaacgagccaagcagtacatcgtcgacggcgacgtgttccaggtggtcatctcccagcgcctcgacatcgattcgcctgctgacccgttcgacgtgtaccgtgtgttgcgcacgctgaacccgagcccgtacatgtatttcatggcgttgaccgacgctcagggccgcgacttcaacgtgatcggctccagcccggaaaccctcatcaaggtggacaacggccacgcgatgaccttcccgattgctggatcccgccctcgcggcgccacccctgaggaagacgagaaattcgccaaggagctgcttgccgatccgaaggaatgcagcgagcacatcatgctcgtcgacctgtctcgcaacgacctgagtaaggtgtgcgtgccgcagtccgtggaagtcgtgcagctcatggacatcaagcgtttcagccacatcatgcacatctgctcgacggtcaccggcaaggtcgacccctcgctgaccgcattcgatgtgttcaagtccgcgttcccggccggcacgctgtctggcgcgcctaagccgcgcgcagtcgaaatcatcgacgagttggaaccggccgaccgcggcatctacggcggcaccgtcggctacttcgatttctccggcaacatggacatggccatcgccatccgcaccgcgttcctgcgcgaccatgaggcgagcgtgcaggccggtgccggcattgtgctcgactccgtgcccgccaccgaatggcaggagacgcgcaacaaggccgaggccagcgtcgaatccatccagatcgccgcccagttgcgcgaactgtaacgttcaacgcatagcgatgcccccgctgacagaagttgtcggcgggggcatcgctgtctgtacgttagtgggtttcgcccatgatgtcggtggcgtcggtttcggtgctcacagcggcttcgatggcagcttcgataccgtgcgccatggtcgcgatcaccataccgggcgtcgcattcttcaccttgccgatcagttgcgcggctgcgtatggacgcatgagcgtcggctgagcccggtcggcatggtgttcgctatgatggacagtcggactttggtaagagacagtattcgtaacaggcaagtaggttattcatggctattgaggtgcagggacttgaaattcagatcggcgcgcgcacgctgcttcaccccaccaacttccatgtggccaagggagacaagatcggtctggtgggccgcaacggcgccggcaagaccacgctgacccgcgtgatcaccggcgacatgctgcccaccgccggcaaggtgcgcgtctccggcaagctcggctacctgccgcaggacacgcatgcctccgatcccacacagaccgcgctcgaccgcatgatgagcgcgcgcgacatcgccaccatcatcaaccgcatccgcaaggccgaaaaggatatgaccgacccggatccggacgtgatgagcaaggccatgacccggtacgacaaggccatgcaggacttcgacaaggctggcggctacgcggcccagtccgaggcgatttccatggccgcctcgctcggcctgccgcaggaggtcatggagcagcagctcggcacgctctccggtggccagcgccgccgcatcgagctggcgcgcatcctgttctccaatgccgacaccctgatcctcgacgagccgaccaaccacttggatgccgattccatcgaatggctgcgcggctacttgaagaagtacgagggcggcttcctggtcatctcccactccaccgaactgctggacgaagtggtgaacaaggtctggcatctggacgcgcagctcggccagatcgacatgtattcgcttggctggaaggcctacctgcaccagcgcgtggtggacgaggagcgccgccgccgcgaacgcgaagtggctgagaagaaggccgaccgtctcatgaagcaaggcattcgactgcacgccaaggccaccaaggccgtggcggcgcagaacatgatgcgccgtgccgaaaagctgctggaaaacacctccgaggcgcagaaggccgagaaggtggcggacatccgtttccccgagcccgcgccctgcggccgcacgccgatcatggccaaggatatttccaaggcctacggttccaacatcgtgttcgccggcgtgaacctggccatcgacaagggctcgcgtgtggtgatcctcggctacaacggtgccggcaagaccaccacgctgcgcctgctggcccacatcgaggagccggacaccggttccgtggaatacggtcacggctgcaagatcggctacttcgcgcaggagcacgacaccttggatctgaacgccaccgtgttggagaacctgcagcatgtggcgcccgagctcgataacacgcaggcccgttcgattctcggctcgttcctgttctccggtgacgacgcgatgaaaccggctcacgtgctttccggcggtgagaagacccgtctggctctggccacgctggtcacctcgcgagccaacgtgctgctgctcgacgagcccaccaacaacctcgaccccgcttcccgtgaggagattctgaaggccattgccaagtatgagggcgccatcgtgctcgtcacccacgatgagggcgccgtcgaggcgctcaaccccgagcgcgtgctcctcatgcccgacggtgacgaagacctctggaatgattcgtatctcgaactcgtagctgaagaatagtagtaaactcgtagccgaagaatagtagtaggagaggtctgccatgccaaccacaacaggtaagaaaatcgccatcgtcaccggcagcgcgctgggcttgggctacgagctcgccagccagctcatcgccaacggctggctggtggccggtgtcgacttcaatgccgaacgtcaggccgaactgaccgcgcagtggcccgatgactcctaccgcgccttcgtcggcgacatcaccgacgaagcgttcgtgaaggaatccgtggcggatatcgccacgctcggccacatcgatttgctcatcaacaacgccggccagccttcgttcaaggtgcccactgcctacgaggccgccgacgtcgacaaatgtctcaagggactcaaaggcatgattctgtggacggtggaaaccctcaaggcctgcggcgagcagaacgtgaaaatcgctcagattatgagcaccgccgccacacgcggcaacgcgaacgaaagcgtgtactgcgccaccaagtggggtgagaaaggctataccaagagtctgcaggccgcatacaagggcaccagtgtcaaggtggtcgccgtctatccgggcggcattgataccgctttctaccgtgacagtcgcgactacgtctccgaggccaagcagcacaccttcatgcagcccggtccgctggccgaagtcatcctcttcaacctgatcaacgaggccaacctcaccgtcaccgacatcgagatcaaccgcaacagctgagcctgctagtctgagatttcagcgccttggtacatacttggtgccaaggcatttcgcgtgtggagagcgaatgcacatcagtgacgatgagtttgaacgggccattgaacaggtgttggatgatttgcctgaacggtttgcgcgggtgctggagaatgtcggcatcgtcgttgcggacgaacccaatgagcgcgaactggctacaatgagcaatccgtgcggtgagctgctcggactgtatgagggcatacccgtcacgaagcgaactacgggctacagcggcgtgatgccggacgtcatcaccctgttcaaggggccgcatgaacgcgtatgctcaacgcaggccgagctgcgccaacggatccgcaaaaccgtgttgcacgagatcggccattttttcggcttcgatgacgagtatctgcactcgcacggctactgaagcgatgctagtttcactagtggggagccgtcactgccgtatgttgccaggtctactgcaagtggtgcaacgcgcggatgatggcgcaacggtcctcgacggttccctcgttggcgcacatggtggcgtaccaacgcggattgcgcaaggtctcggtgccggtggcctcatccgtggcgacgagcgtgtgcagatcgttggcgtactggaaatgcaggtggctgagcagcccgccctcggcgaacgccttgcgcgaaggcagcggattgatggcaagtagccagcggaacgggctgtcttcggcggccggatcggtggtgtggaacacgaaggtgggggagccttcgagaccgtgctcgatgacatggtcgatggtgtattcgtaggtgtcgaggctggtgtcgtcctcggcgaaccattcgatggcgagcgcggcatcgtccgtggagccggattcggcggccggctcgttcacacgccagtagccgatatggatgatgttctccgggctggtggtggagcaagccatcgaccagaacgtcctgatgccgcgcgcggccatcggggccatcttcgggttggcgagcaccgcctgctcggcggcttcccagatctgctggatggcggcgtcatccgaatcaatgtaatgctcgaagctttcccattcaccgagccagtcggtgatgtcgaaggccgtggaatccgtggtgttgctggcggtcattgcgcgttcctttcatgggtggatgtggtggcgaaattggtagaggcattagggttggggctgctggcatctgggttactggcatgcgagccgttgttcccggaatcgtcggcgccaagattgacaatgcggtcgcaccagccggcggcgagctcctcatcgtgggtgaccacgagaatcgccttgccttggctcgccagttgccgcagcagttcgccgacctgctccatgtggtagcggtcgagtccgctggtgggctcgtcaaggatgatgaggtccttgccgcacatcaatgccgagccgatggcaacccgctgcttctgcccgccggacaggctcatcggatgccgttcgacgaacgctgcaaggtcaagatcggccatgacctgattggcttgagcggtgatgccggcatccgtctcgtcgagtccgatgagcagttcctcgcgcacgctgtcggagaacagttggtagttgacatcttgcatgaccaggaatccggcgcgggtcaggtcgcgcggtttcgcgggcacgccgttgagctcgatgcggcccgaaacaggcttgatgagtccggtcaacgtgcgcacgagcgtggtcttgccgcagccgttgttgcccatgagcccggtgatttcgccggcacggaaccgcaggtccgggatggcgcgggtgaagccgtccttgcctttgtatccgatggtgaggttatgggtgccgagcaatgccgaagtgcactcatccgcggccgggcttgaagccagcgtcgcaatccggtgccgatacggttgcaggtccaacgcccgcaatcccatggcggccacgcagccgggggagagggacaggaattcatcggcctcgtaatcctgcacgatatgcccgccgtcgaataccacgtaccggtcggccacgccgttgagccatgcgagtcggtgttcggcgattacgatggtgagcccttcgtccttcatctgctcgatcatggcgcgcatgtccgcgatggcgttcgcgtcgagattgctggtcggctcatccaataccacgagcctgggccccagcatggtggccgccgccacggcgatgcgctgcttttggccgcctgacaggtggaagatgctgcgatgcagcagatgcccaatgccaaagcgctcagccacggccgtgatacgacgattgatgtcctcggccggcagccctatgttttcggccgggaaggcgagctcgtcggtgacgttcgcgttgaaatactgggttttcgggttttggaacacgctgccgaccagcggggtgagccggtcgatcggcacggtctccacatccagcccgcacgtggtctggttgccggcgaacgcaccatggaagaatgaggggatgagcccgttggcaacgcgcgtatagctggttttgccgcagccgctcgccccgcacagcacgatgcactcgcctgcgggcacggtcaacgtgatgtcgcgcaatgccggctctgcggcatggtcataggtaaaggagatgccacgggaggcgatggttcccgcagacgtgtcgagtgggccacccttgccggtcccaataatggcagttgcattcggctgcgattggttgccacccatcagatcacccccgcgatatcgagcgcgagcggcaaagtgaccacaatcatgaccagccagtcgaccacggtcatacggatcagcgtgcgcgaggtgtgctcgccctcacgcccgagccccttggtcagtgccgccaccgacaggtcctgtgccacattggtggcgttcatcagcagcggaatcagaatgtattccaacgattgggccgggtgacgaaccagcccccagccgccggacgcgatgccgcgcaacgccatcgcattgcgaatctgccggtaatcctcggcgatggtcgggaagaagcggatgaccaccacacagggaatcaccacggcctcaggcacgcgcatacgccgcatcgcgcagatgaacgcgctcgcggacgtggtggtgaacgtatacgcgccggtgatgaaacagggcagcatcatcgtgacgcccacggccagcgcggagaccacatgcagccacggcagtcccagggcatcggggtcgagcattcccagcgcggtgagtacggcataggtcacgccgaagttcaacgcggttcgccatcgggcggccgccagcaggggtagcaggaacagcacgaccatgacgatttgcgtggcgagccctacatggaagaacagcatgaggttcgccaccagcagaaggtagagtttcgcgcgcggatcgagcgtccggcgggcaggattcatcaggcgataccggccttgatgaagtgcttcttcatcatgcgctggccgaaccagccgccgagaaccgcgcacaccagaatcgcgatcatcgagatgaagaacgtgccggtgttgatgttggcgaatacgccgtcgatgtaggctgcgtccttgccgcgcgcctgcaggctcgccacgtaggcgtccttcatgaaccacaggggcaggatcgggccggtcaggccgtaggagaacaccacgtagctgacgagcagtagcgccttgctcttatacttgccggcgcgcgcgatgaggtcggccgccaccgggaacacgatgctggcgatgaacgaaagcacgaaatgcccggagatgaacaggaacagtccgatgatcacgcccatgacggtgatgccgccgaatttgccgaggcgtgcggccagcagcatgtacacgcagccggagatgagggccgtgatggcgggcaggaagatggagccgaagccgctggtgaacagggtgctcaccagtgtggcgatgcacaccatcacgaagtacagggccgcaaacacgccgatggtgatgaggtcggagacctccagtttgccggatttggcgggcttgttgagctggtcagaggtttcggcgggcgtgttcggtgcggtcacgatgttttccgtttcgtatgcattgacaatattcctctcgccaatctaacgatgatttcccgcagaggcaatagtctgtctgtgattttttagcatggcttgggcagattctagtggtggttgcaacacctgaggtttgagcggccttccatggtcacgttgtcggttgttgaggttatcacgcggcgtcgagcagttcgatgatcttctcgcttggtttcatgaacccgagggttttgcgtggccggtcgttgagttcctcggcgaccgcgtcgaggtagtcctccgggtagacggataggtcggtgcctttggggaagtactggcgcaggagcccgttggtgttctcgttggtgccgcgctgccacggggagtgcgggtcgcagaagtagacggccatgtccagcgaggcgccgatccgtttgtgcagggcgagttccgctccctggtcccaggtcaggctgttgcgcaggagtttgggcaggtgctgcatcttgtcgatgatggcctgctggacgtgttcggcgtcgtgcccgtcgggcaggtgcagcaggatcgtgaacctggtggtgcgctcgacgagcgtgccgatcgcgcttttgttgcggctgccggtgatgagatcgccctcccagtggcccgggaccgcccggtcctcgatctccgggggtcgctccgagatcatggccatgggttcgcggaaacggggtttgcggccttggccgccttggggtctgcgggcggttcgcccctgcctcatggcgcgtttcagctcctgcttgagttcgcccctggcctgcaggtagatggcctggtagatcgtctcgacgctcgcgtgcatatccccattatccgggaagtccagcctcagccggttggctatctgctccgggctccaatgcctgcgcaacccggcggcgatctcgtcccacagtcgcgtgccctcggccgccttgcgcggtttggggcgtttgagccggtccgcggccttctgctgggcgcggtaaggctcgtaaccgccggactcgggattcctgttgcgctcgacctcgcggctgaccgtgccggggtcgcggcccagcaggcgggcgatggcgcggatcgaatcgcccagacgcagacggtccgcgatctggatgcgctcctcctggctcaggtagcgcggatggagggtcttgggtttgtccatggtggaacgataccagtccaccaggggtttctcgttccttcccgtggcgcgcgtcctgccgttgcgccacgccttgccggtgcgtttcgagacgccgaccgcgtgcgcggcctgggtgaagttcatgccttcctcgtccagcaggcgcacgtactcggcgcgtctcgcctcgcacatcagcttcctcgtcggatattcgacgccgttgaacgtccaacggtgttccccgccacggtcttcgtttcggtggcttctggtcacctgaccctccttgcggtaggtcaggtgttgcaacgatcactagaacccgccccttggcgcccctccctgtgggggggggcgaagggcgtggcgcgggcggggtgtggttcgcggctatcggctagtatggtgcggtcacgacagagggaggcatgctgtggccgatgtgatgcgggagctggaacggctgcgaccggtgtatgagacgggcgtcctgcggttgctgttgcgccagaacgcgatgctgtacgtgtcgctgctgcgttccacgttcgacccgctcaccggcgagctgccgcgcgagaccgtggaggagcggttcgcgcaaagtctgagcagtctggccgacgccggcgagtatgcgccgcgcgaggaccagaccttcgccgaggccgcccatcagatcctcgccgacctgacccgtgaaggcgaaggcgactacgcctggctcgccaactcgcatgatgcggcctcacaccgattcctctaccgtttgacggcccgcgcccaccgcgccatcgaggcgctgagcaggctcgaagacgaatcacgcgccctgtccggcgcgcaggccaacagcatcatcatggaaatcgagcacgcgcgcatgcagctgaccgccgaccccggcgagcgcatcaaactcctcaaccgtgaaatcaaggaacgcaagcacgagatcaaacgcatccaacagggcaagcagcatgccacgctgagcgaagcccaggtggaggacgtgatcgccgtgatccacaacacgctgcgcggcgtgcccatcgacctgcgcgaactcgtgctcgacgagcgggacaacggcgacgccttgcgtcggcgcatgcaggccggcgacatcagcgtggacgagaacctgacccgctaccacgatgaataccgccgctcgttccgcgaatcagacagcggccgccgcttcgaggacgccttccaggtgatcatcaccgacgagggccgccagcaaatcgacgaagccctgcgcgccatcgccaaaaccccgtatctggccggcgaatccggcgtgctgctcggccagatccgcgacgaactggcccgcatctacgacggcatcgaagccgtgcgccgccagatgcgcgtctccgacgaggcgatcagccggctcgtgcgccagcaaaccgacactcgctaccgtacgatgctcacccgcttgaaccgactgtacgcgcgcctcaacgcggatgcgaaaacccatatgggagacgcctcgcgcccgtacgacacggccacctcggacgcgctgttcgcgccattgccgatgcgcccggccaaatccatgacccgcgccaccgcacccggcctgagcgacctcgccgccgaagccccgcagtcgactccggtggccgatctgcgggacatggtcaacagcggcggcccccgactcctgcgcatggtcagcctcatccggcgcaacccggtgaccgttgacaggtccgatgacaggcccggcgcaaccctcgtggacatcgccgccagtttcaaccggctgcccgaaagcgaacgccgcgaaagcgagatcgtcggcttcctgggcgggctgggagccgtaagcggcaacgccatcgccgacgagccgtccactgacggcgtcggcgtcggggtcgacagcgacatcgccaccgagccggctccggcgcagcgcggcgatactgcgacctggcattgcgtatcgatcgacggcgagccccggaactggatcactagaccggtgctggccgacatggacgagctgagcatcattgtggaggaaggatgaccgtggccgaggaacacgaggaacacgaggagcatatggacaacgccaacccgtacgccctgttcgaaggcgacatcggcgacatgccggccgaggcacgcatggccgccatcgccctcaaacgcgaccgctatatcagcgggcccacctacgacaccgtgctcgacaaccgcgacgccgtcgtacgctccctgaacaacgacctgctcgacttggtgatcaacgaacgctaccgcatcatgtacgccacgcccgtggccggcgacgacgtgaccctgcgctcgctcaaaacccgtgtcagcctcaaacgcgaggaggccgcgctgctcgccttcctgcgcatccgcgtcctcgaatacgagaacgtgcacgccgaccccgccgactggctcgtcagctttgaggagatccgcgccgcgctcgccaccggcgccggctatctggccgcccgcaacgacgaggaaggcgtggcaaagcagatcggcgccatcgtctccgcgatgatcacctacgggtatttggtgcgcctggacgacgaagccatgtaccagatcacgccgctcgtgcccgtggtgctcgaccgcgaactggccgacacctggctcgacgtcgcggaacacggcgacggcgacacggaagatgacgatgacgacgagaagggagccgaatgatgcaggcgacagacgtgcagatgatcgcggaccggtggatgctggaatcccgccgactcatcaactggggctcctatgagggctaccacgaattccgcccctccacggaccacaagctgccggtgaccctgctcgccggcgccagcgaatccggcaaatccacgctggtcgacgcgcagatctccctgctgtacccaaccggtacgccgttcaacaaggcctcgaactccggccgctccgaacgcagcgactacacctacctgcgcggcatggtcggcgtgggcagcaccgaaaccggcgacgagccgctctacctgcgcggccgcgacgagaacggcgcaccgcaacccgtgtggggcgccatcgtggacacctatcgcaaccagaccaccggccaggtgctctcctgcgccaaattcctctacctgatgcccggcgacggccgcggcgacgtgcgccgacagtacgtggtctggggcaagcccgtggaccccaggcgcatggaccaataccgtgacgccccgttcacgccggcccagctcaaagccacctaccccgactgcctcacattccccagcgccgaagcgttccacacacacatctggagcgcaatgggcctgagcgaggccgcctgtcgactgctgcacaagatccagtccgccgacgcgccctcccggctcgacgacatcttcaaacaaggcgtgctcggcgtgcccgaagccctggacctggcccgcaccacggtcgaggactacgaacgttacgacgagaacttccacgccatggacgagaagacccgccgcatggacacgctgcgcggcatccaacaggcctacggcgaatacgccgccgcacgcggcaaggcccgcgccttcgaaccggtcaagccggccgtcgacggcacggtaccggccgtgctgcgcgactgggcattggcccgcatgcgcggcgaagtcgccgtccaactgcccgccgaccgcgccgaacaacagaacagcgaggcggaagccaagctgctgcgccgccgaaccgaagacctgcgcacccgtctcgacatgatccgcggccagatgcagggtctggacggcggcaacctgacccgactcgaactcgaactcgaccaggcccgccgcaccctcgaagacgtgcaagccaaccgaacacgaatcgaacaaacgttcgcatccatcggcgagacgctgcccggcgacgaacaggcctggaacgaacgccgcatcaacgccgtgaacttcaaacgcgaatacaacaaacgagacggcgaatgcgaggaagccctcaccgccgccatcaacgcgcgggccggcgcacgcggcgacctcgaacgactgcaacgcgacttcgaccggcaacgctcccagcgcacccgcatctcccagcagatggacgaaacccgcgccatgctctgtcgcgccaccggactcacccccgccgaactgccgtacgtggccgaactcatggacgtgaacgaacacgaggaagactggcgtctcgccatgaacgtcgcctacgcgcccatcgcccagaccatcctcgtcgacaagcgccacgaacagggcttcgccgccaaagtcagcaccatcgacccgcgcaccatgccccgacgcacctggcagttcgtggacaccgcacgccactacgacgacaccggcgcgcacgcgaacatactcaccggagaacaggacggcgactggctgtccggcaaactgcgctaccgcgacgactcgcccttcgccgactggctgcgctcgcagacccaggacgaacgattcgacgccctatgcgtcaccgccatcgacgacaccgaccgcaccaaccgtcaggtgcaggccgacggtcagatcaaatccggcgcacgcggccagcacggcaccaaagaccgcgcccaggtcatcggattcgtcaacgaaacctacctcaacgcgctcgcagcgcaggtcgacgccgcccgcaacgcgctcagccaagccgacaccgactacacggccgccaaaacacagtccgataacctccaccgcgaactcgaactggccaaccagctcgcctacacgtcctgggagcgcatcgacatcgccggcgcgcaacggaccatcacggacacgcaggacgccatcgcatccatcaaaaacgatcccaagctcgccgaactcgccaaacagcgcgacgaactgaacgccgaactcgaccgtgtggaacgccagcgcatcgaatccgaccaggccgcggcccgcgccggcagcgccgtcgaagcggcgctcatctggctgcgcgaccatgccgacaccggcacgacggacgccgccggtgccaccgccgacaatgacgatgacgccgcgtccggcccgctgccggacgaagtcacggcggcgctcgccgaatcctacgacaaccgattcgccggactggcggacgccgccatgcgcgcgcacatgatcatcggcgcgggcgcggcaggaacgcaggcgccgggggagagcttccccgaacgcaccatcgccggcatcggcaaggacatggcctcccgcatcaacctgctgaacggccaggccgatgccgcacgcaccggcgtcgaatcgaaaatgagcacctacatcgcgctctacgcggccgacgatgattcgctgaccgccagcgtggaggactaccggtactatctcgacgaactcgccagcctcacccagctggccgcggttgccgccaccgacgccgaataccggcgctgcctcgaacagctgctcaggagcttcctgaccatcaaacgcgccatcgacacggatgccagcgacatccacgaccagcttgaccgcatcaacgccatgctcaaaggccagcagttcggtcccaagcacggcagcctgtccctgcacgcggacgtgcgccgtcccgagcgcaccttctgggcgcagttcatccgcgtcatcggcaccctgaacgattggaaatccgccgacgtcaacgattccgacgcctcgcgcaaggctttcgcggcctgcgcgccgatggtcgggctgctgcgcgccgaactcgcgcaggtcaaggacgcgaacggcgtgaaaagctacggcgcccgcaacctcgacccgcgttgccgctcgtccttctacgccatcgtgcatcatgccgacggcccggatgaacgcatcacctccaccggcggccgttcgggcggcgccttgcaggagctcacctcattcgtatacggcgcggcgctcatctacctgctcggcggcggcctgaccagcgagccctcgtacaccacgctgttcctcgacgaggcgctcatcaaggccgacggccgttacacgcagcgcgccctcacggtgctgccgcgcctcggattccaggtcatcgtctccgccccggaaagcaagaccggcgaaatcctcgaggtctccaccaaggcctacgtgacctacaaggaccctgacaccggcctcacctccctgcgcgaggccgtgctgcatcagaatgacatggacgatgaatcatcgtcggatatattgaaggatgacggggttgccgaatgagcagtcctggcgtcgccggtattaagacgattcggttcgactcgacgatgttcgaaagcaggtgatgggaactgtggccggcatgaaagacatcgctgcgatcaccacatgcgtgaagaaacatatgcgttcacatatgtacgacatcgaaccggcatggccatttcccgtgccggtgggattgccggaccaagcatttttggaaaccaatgcgattgcggtgcatgacaacaacaatgagatacggcaatgggcaagcaagaatggttgcgaaatcataaccaagcatcgcaccataggcacctctgtcgagctgatctccaaagtcgtcgttcctgacgaatcaatagccatgcgtgtggttggtcgtacgctggcggcggaatgtcgcgaagcgcgccgccgcatagcatgtctggttgctgcttgtgacgttgctccggaaacaatcgaatcggccgctcgcatgacaggccatgaacagcctgacgacttcgatctgcttgtcagcgcagttcgatatttcaggcatcatgacgtgaccggtatgacgccgcgacagattccactgacaggattcagcggcaaatggctgaatgagtcaaaaaccaatcgtcgtaaggccatttgccgactgctcggtgtcgaaacgttgggtctgtcaaaacggccgaccgaactgcggttccgttatctcgatccggtccgcgacgatgctgagctcgaacgcatcatatggtgtccgtgggaaggcgaagcgttatccggcattaaatatgctgtcatcgttgagaacaaagacacgtatcagactatgccgccgattgcgcagggcatctgcatatggggttctggtcgcgctgtaagcgatgctgtacctgcggttcctgcactgcgtgacatgcgtatcgtgtattggggtgatatggatgcggatggactggaaatactttcgacattacgtgaatcaagtatcgaatgcgactccatcctgatggattgcgatgcatacgatcggtaccacagatttggtaccgatcgtactgaacgcagcgcgaagattgctatgcgggagcctaagccgacgcccggccttcaatcggcggagcgacgtctttatgaacgactgtgtgctgacaaaacaatcgcttatcggcgtatcgaacaggaacgcattcccatgcgtgatgcagttgacgaattacgcaagcttggcatccccgtggagtccattgaaaatcaggatttgccgatttaggctgagtgattggggatgttgccaagagctagaacggcttagctttttctcgtctcacattatgccttccgattaataatgcaacggcattgcatagctgcaaggtccggcactgctatccgatactatcgaactgttgttttgcgttgcgcgagaagggacaaacatggcaaccgcttggggtgacgagagtgtgcggaaaaccggagttccctcgcctatgtacttgatgggcgcatgcgtatgtgatgatacggaaaccgaaacaaggcaaagattggcgttgcttaagcccaaaggagcaaggaaattgcactggcgagacatgcggccatcattgcgtggcaaagtcgttgatgccatggctgcaatggacattgatcatgtcattgtggctgcggtaccaatgagccagtggaataccgccgaacgcgctcgccgtaaatgtttggaacgtcttctgcctctgctggaaacagaatacaacgtggacacgcttgtgcttgaacggcgcgagatttcacaggacaggaacgatatccgtttcatcgatggattgagaagccgcagatttatcgggccaattcgtgtcgaactctgtgcaggggagactgatgcaaggctatggctccctgatcagctgctaggagcgtacggtgatgcccaggccggtactggaagatacgatgaattcctcggccatgttcgaacagtgttcatcgacagtgattgatgtcctaaaaccgtgtatacttcatggtaagccaaccccgctggggaaatggaagtgagagccggacgccccgagtatcttgggggccggctcttgcgtttcggtccactgatggtccggaattttgcatactatggttcggttttccggcctgacacgccatcgaacaagcgttcgaatttggtcgtgtgttcgggtatccttgggacagatttggcgcgcgcatgaccgtgcgcgcgggaacggtgagatggaaggtggggtgtggctgtggcggcaatgcagactggcgcaaggcgcgcaacaagcgcaacgggcgcgaaaaccggcaagggcaagaacggtgaggtcatcgtcgaaaaggtgatgaccagcgactccttcctgagccgggagatcaaaaaggcgccgctgattgaacacgatggttcgctggtagctgatatctcgcacatcccgaacgatctcaagatcacgattcagggtgcgcgcgaacacaacctcaagaacgtcgacctggcgattccgcgcaatcgcatggtcgtgttcacaggcctgtccggttcgggcaaatcctcgctcgcgtttgacaccctgttcgccgaaggccagcgacgctacgtcgaatccctatccgcctacgcccgccagttcctgggtcagatggacaagcccgacgttgacttcatcgagggcctgagcccggccgtctccatcgaccagaagaccaccaaccgcaacccgcgttctaccgtcggcaccatcaccgaaatctacgattacctgcgactgctcttcgcccgcaccggcatccctcactgccctgaatgcggcgagcccgtcgcctcccagaccccgcagcagatcgtcgacacgctgctcggctacccggagcgcactcgattccagattctctcgcccgtggtcaagggccgcaagggcgagttcgtggacatgatcgagctgctgcgctccgacggctacgcccgcgcgctcatcgacggcgagatgacgcagctgtccgacgacatcaaactcaccaagcagaagaagcacaccatcgaggtcgtggtcgaccgactcgtggtcaaggacggcatccgccaacgcctgaccgactcggtggaaaccgccctcaagctcgccaacggcagcatcgtcatcgacttcgtggacgaggaggaaggcagcccggcccgccgccagccgttctccgaacaccgcagctgcccgaacgggcacacgctcgaactcgacgaggtcgagccgcgcaccttctccttcaacgccccctacggtgcctgccccgcctgcaccggtctcggcttcaaactggaaatcgacccggatctcatcatctccgacccggacaagtcactggccgacggcgtcatcgaaccgtggagcggcaccaagatgacctcccagtactacggccacatcctcgaaggtctggccaaggaaatgggcttctccatgaagaccccttggaagggcctgccggacgacgtcaagcacgacatcctctacggccacgacttcaaggtcaacgtctcctaccgcaatcgctggggacgcctgcgcgaatactccaccggcttcgaaggcgtgatccgcacgctcatgcgacgccacgacgaaaccgattcgcagtccatgcgcgaatactacgagtcgtacatgcgcgaagtgccctgccaggtctgccacggacgccgtctgaagcccgaagtgctcgctgtcactgtggacggaaaatccatcttcgacgtgtgcgacatgcccgtcgtacgcgaactcgcctggatcaacggcctgaaactcgaaggctcggcacagctgatcgccggcgaagtgctcaaggagatcaaggcccgactcggcttcctgaacgacgtcggcctcgactacctgaccctctcgcgcgcggccgccaccctgtccggcggagaagcgcagcgcatccgactcgccacgcagatcggctccggtctggtcggcgtcatgtacgtgctcgacgagccgtccatcggcctgcaccagcgtgacaacgaacgcctcatcgaaaccctgcaccacctgcgcgatctcggcaacacgctgattgtcgtcgaacacgacgaggacacgatacgccgcgccgactgggtggtcgacatcggccccggcgccggcgaacgcggcggcgaagtcatctactccggccccgccaagcacctcatagaagccaagcgctccatcaccggcgactacatcgcccaccggcgagagatcgccgtgcccgccaagcgccgcaagatccacaagacccaggtgctcaaagtcgtgggtgcccgcgagaacaacctcaagaacatcgacgtgagcttcccgctcggcgtgctcaccgtggtcaccggcgtctccggctccggcaaatcctcgctggtcaacacgatcctctacccggtgctcgccgacaagctcaacggtgcacgcatcgtacccggccgccacacgcgcgtggaaggcgtggaccaggtgcgcaaggtgatccacgtcgaccagaacccgatcggccgcacgccgcgatccaaccccgccacctacaccggtgtgtgggacaagatccgcaccctgttcgccaagactcccgaagcccaggtgcgcggctacggccccggccgcttcagtttcaacgtcaaaggcggccgatgtgaggcctgccacggtgacggcacgctgaagatcgaaatgaacttcctgcccgacgtctacgtggactgcgaggtctgccacggcaaacgatacaaccgcgagaccctcgaagtcacgtacaacggcaagaccgtggccgacatcctcaacatgcccatcgaggaggccgccgacttcttcaaggcgtacaccggcatctcccgatacctgaagaccctcgtggacgtcggcctcggctacatccgactcggccagcccgcacccaccctgtccggcggtgaatcgcagcgcgtcaagcttgccaccgagctgcagcgccgatccgacggcaaaaccgtgtacatcctcgacgagccgaccaccggcctgcacttcgaagacgtgaacaagctgctcaaggtgctgcagtccctggtggacaagggcaatacggtcatcgtcatcgaacataatctggatgtgatcaaggaggccgactggctgatcgatctcggtccggagggcggcgacggaggcggcaccatcgtcacgcagggcacgcccgaacaggttgccgaatgcgaagcctcatggaccggcaagttcctgaaacccatgctttagccttccattgcagctgacctcgggtgggttggggtgtttgttgctggacatgctccgggccgctcaggtcaagtctttacggtccagcaacacacaccccaacccacccaatccctgatgattggttttgcttaatagcgaggaggattatgacgaacgatattgagcggcatagtccggatgagtggcggaagactgcggcggcgttaatgtcggaaagcatagctgtgggtgccggggaaacgacggcgaaggtgaatgcgaatggggcacctttgctgggggattctcgcgacctgttccgacccaagacctcggatattcccgccaaacccggtgtgtacaaatggcgcgacggggaagggcgcgtcatttatgtgggcaaggcaaagaacctgcgcaacaggctcaccaattatttccagccgctgtatctgctgcatccgcgcacgcagaccatggtgctgaccgcacgcagcctggagtggacggtcgtcgccaccgaactggaatcactgacgttggaatacacgtggatcaaggaattcgacccacggttcaacgtgcagttccgcgacgacaagacctatccgtatctcgcggtcagcacgggggagcgaattccgcgcgtgtgggtcacgcggtcgcgcaaacggcgggatacccggtatttcggcccctatgccaaagtgtgggaattgcggcacagtcttgaccggttgctgcgcacgttcccggtacgcacctgcaccaccaacgtgttccataaggcgcaactgaccggacggccatgcctgttcgcttccatcggcaaatgctccgcaccctgcgtgaaccgcattgaagcggacgaacaccggaggctgtgcgaacagctggtcggcgtgatgaccggacgactcggacggccatacatcgcccagttgacccgcgacatgaaagaggccagcgccgaactcgaattcgagaaagccgcccgactgcgcgaccagatccaaatgctggaaaccgtggtgcaacagaacgccgtcgtcttcgaccaggatgtggacgcggacgtgttcggcttcgccagcgacgagctcgaagcctccgtgcacgctttttatgtgcgcgccggctcgattcgcggcgaacgcaactggagcgtcgaacgagttgaggacatcgatgacgccgacttgatggccgaccttctggtgcaggtgtattcggacgccgccggggacaatcacccccagtcggccgcgaccatctccactaatcgcgaggccatcggctccacgcaaaccatcacggccacggacgctgtggcacgcgcccaggccacccgagaacgcaacacccgtcaggagaccaccgggcgcgcggacctgctggcacccatcgcaccggtaccgcgcgaaatcatcgtgcccgtcgaaccggcccgccgtgaggaactcgaaggctggctgaccaatctgcgcgggggagcggtgaccatccgtgtggcctcgcgaggcgacaagaagcagcttatggaccgcgccaacgagaacgccagccaagcactgcaacgcagcaagatgagccgcatctccgacatgggcgcacgcacccaggccatgaacgatgtggccaaggcattgggactcgcggaagccccgctgcgcatcgaatgctacgacatttcgaacactgtgggcggtgccttccaggtggcctccatggtggtgttcgaagacgcgatcgccaagaaatccgaataccgacgcttcgccatccgaggcaaggacggcaaaggcgcggtggatgatctgtccgcgctttacgagacgctcacccgccgcttcaagcacggcaacatcgccggcgactccggcgaaagcatcgacgcggaacagcgtgtggcctcggccgccggcaagatgaccactgccgtggcggcggagacaatcgctgcgaacggtaacgacaatggtgagggcggttccgacatcagtggcaaggggcacgcggtgccggtcggagtgcagaacgatgcgcgggagtccccgcccgacatcgtccagcagaacacaaaccggcatcactttgcctacaagccgaacctggtggtggtcgatggcggcaagccgcaggtcatggccgccgccaaggcgcttgaggactgtggcgtgaacgacgtggccgtctgcggactggccaaacgcttggaagaggtgtgggtgccggacgacgactatccgatcatcctcaaacgccagtccgaaggcatgtatctgctgcagcgtgtacgcgacgaatcccaccgcttcgccatcacctaccaccgccagcagcggcgcaaaggcgccctgcgcagcgcgctcgacgagattcccggcatcggcgaaagctaccagaagcggctgctcaaccacttcggctcggtcaaagccatgcgcgaagccagtgtcgaggacttcgagaaggtcaaaggcatcggccacgccaaagccgaagcgctgtacaacgcgctgcacgagcagtgagccggcccggtccagcagcccagagtaaattttcggttgcggggcctgtggttgacatattcgaagcaaagtgtcggctagcatgggaacagacatcaaggaggggatatggccaatcatcgttgcgctgtactcggcaaacccgtcgcacactcattgtcacccgtgcttcacaacgcggcctaccgttcgctgaaactcgacgattggctgtacgacaagcacgaggtgggggaagacgacctcgacgctttcctcaaaggccttgactcgacgtgggctggcctgagcctgaccatgccgttgaagaagaccatccaaccgtacggtgttccggaaaatttgtgggccaaggaactgaaggtggcgaataccgcggtattcgactggagcgtggctgccgatgatcccgcttggccgaacggcaagccgggcatcaagctatacaacaccgatgtcatcggcatccaactcgccttcgaccatgccaatcgcgaactcggcgaacaccacaccgcgtcgagaagcggcaccgcgctgatcatcggcaatggcaacaccgccacttcggcgttggccgcatgctgcatgatgcccgaaatcggccatatcgtcgtcgccgcccgccaccccggaaaaaacaccgggcttaaaccagtggccgaaaagttcgtcaacgtgcataacccgtacaacgaaatcgaattaggcgacgatcaggccctgctcgaggcagcccgcaacgccacctatgtcatcaacacgattcccggacacgcggccgacaacgtcgcggatgccctcgccgatgccggaaccgagccattctccggactgctgttggacgtgatctacgatccacgccccaccaagctcatggaagcctggcgcgctcatggcggtcacgccatcggcggcgaagaaatgctgctgtaccaagctctcgtacaggtattgctgatgaccggtatctgggatgacgacccgcccagcgatgccgaccagcgtctgcaggacaccaccaccgaagacgaccagctggagatcgcgatgcgcaaagctcttgaggaggcgctgtaatgaatcaacagacaacgaaccgcgataccggcgaggcggccgccacgaatgcgccggcgaattccgcgacatccacatcgactccggacaaccagccgaccccgcttgatgccttcgaagtgctgctcatcaccggtatgtccggcgcaggccgctctcatgccgctgactgcgtggaagacatgggatggtatgtggtcgacaacctgcctcccaaactgcttatcccgcttgtcgacatgatgaccacctccggttccggatcggagtcaggcgtccacaagcttgccgccgtcatcgacgtgcgctccagctatttcgacgagctggccgccgtgctcggccatctggatgatctcggcgtcaaaacccgtattctgttcctcgacgccagcaacgaagtgctcatcaagcgctacgaatccgtgcgccgcccgcacccgctgcagcacggcaaccgactgatcgacggcatccttgaggaacgtcacctgctggaagacctcaaggaacgagccgactgggtcatcgacaccagctccctgagcatccaccagctgtccaccaaactctacgaggcgatgctcggctccggccccaccaccgtggcagtacacatcttcagcttcggcttcaaatacggtatgcccatcgacgccgatttcgtggccgacgtgcgttttctgcccaacccgttctgggtgcccagcctgcgcgagcttaccgggcgcgacaagccggtcgccgactacgtgctttccagcaagggagccaaggaatttctcgacgcttatgagaaagctatcgagattgcgttggaaggatacgcccaggaagacaagcactacgtaaccatcgccgtcggctgcaccggtggtcagcaccggtcggtggcgatgagcgaagagctggctcgccgcttacgcgcacatgggctcaacgtaaccgtttccgcgagagaacagcacaagcgtcactcatcgtaagcaggcgtcgagcggtcatcgggcaagtgttcggtgaccacactgcgagaaagcagggcccataatacgtatcaaacgggttcgcttgtccaccagattaggtatcacagaaagccgatggcttccgaccgtgtgacagcagataacggcacgaagcgcctgaagcattgagaagaacgggactgtaggaggtagatcttggctcttctggacgatgtcaaaagcgagttggcagcctttgaaggcgattcgccagccgcgatcaaggcccaagctgcggccatgattcgttttggcggcggtcttcgaccggtacagaatacatacgttatccaagccgtattcacctcgcttgacgttgcagaatggctgaagaacacgttgaggaacacgttcgggcacgaagccgaggtcaatcacctcacacgtcagaccccgaacggccctgtcgagacctacgtggtgctcgtcacccgcaacgtagtggccttggctttgcagaccggactggtcgaccgccgcaagcagcaggtccgtggactgccgtctgaagtggtcaacggatccatcgcccaaatcaaagcggcatggcgcggcgccttcatggcccgtggcttcctgtccgatcccggtaaggccagcttcctggaaatcgcttgccccacggaagaggccgccatggccctgtgtggcgtggcccgtcgtctaggcatccaggccaagcatcgcacgctgcgtagctccgagcgcgtgacactcaaggatcccgacgccatcgaacgcatgctcaagctcatgggcgccacccgttcggctcgcgaatggaccggcaagcgttccgatggcgaggcccgcggcaaggccaaccgtctggccaacttcgatgacgccaatatgcgccgttccgccaaggccgccgccgaagccagcgaaaaagtgcagcatgctttcgaagtactcggcgataacattccggacaacctccgtcaggccggccagctgcgcatcgatcacgtggacaagagcctcgaggagctcggcaagatcgccgaaccgcaaatcaccaaggatgcgattgccggccgaattcgccgactgcttcaacttgccgagaagacggagaaggctcgcgcagccgaaggcaagtaacccgacaatccgatttgccgtgcctattcggcaaaacgcgacaacgatgtgacaaaacaccgcattcagtcagtagacgaatgcggtgttttgttccggaatgcctgtaatatgcaaagtggcaaaattggccactttgacgtgcgattcgtcaaggaaaggatattcatgaagacactcaaggaccttggagatctcaagggcaagcgcgttctggttcgcgctgatttcaatgttccgctggacggcaccaccatcaccgatgacggtcgaatcaaggctgctctgccgaccatcaagaccctgcgcgaagaaggcgccaaggtcatcctcatggcccaccttggccgcccgaagggcaaggtcgttcctgagctgagcctggccccggttgccgcccgcctcggcgagctgctcggcgccaacgtgccgctggccaaggacacctacggcgaggacgctcaggccaaggtcgccgccatgaacgatggcgacgttgtgctgcttgagaacgttcgtttcaacccggaggagacctctaaggacgccgacgaacgcgccgcttacgccaagaagatcgccgccctcggcgaggccttcgtttccgatggcttcggcgtggtccaccgcgctcagggctccaactacgacgttgccgccgatctgccggccgccgcaggcctgctggtcgagaaggaagtcaaggccttgtccaaggccaccgagaacccggagcgtccgttcaccgtggtgctcggcggttccaaggtctccgacaagctcggcgtcatcgagaacctgctcgacaaggccaaccgtctggtcatcggcggtggcatggtgttcaccttcctcaaggccaagggctacgaggtcggcacctccctgcttgaagaggaccagcttgagaaggtcaagggctacatcgagaccgccgagaagaacggcgttgagctcgtgctgccgaccgacgtcgtcgtgaacgccggcttcccggccggtgacaccccggttgctccggaagtcgttgccgccgacgccatcccggccgacaagatgggtctggacatcggcccggagtcccagaagctcttccacgacaagatcgtcgactccaagaccgtcgtgtggaacggcccgatgggcgtgttcgaggttcctgagttcgccgccggcaccaaggccgtggcccagggtctggtcgacgccaccgcagtcggtgcgttcaccatcgtcggtggcggcgactccgcctccgccgtgcgcaacctcggcttcccggaggacggcttctcccacatctccaccggtggtggcgcttccctcgagttcctcgaaggcaaggagctccctggcctgaaggtgcttgagtaatccattttctagctcccctccttgaggggagctacgtttttttagaagggaaacatatggcgtccaaacgcattccgttggtggccggcaactggaagatgaatttcgaccatcttgaagccacttacttcgtgcagaagctggtatggctgttgcgtgacgctcacttcgactttaaacgctgcgaagtcgcgcttttcccctcgttcacgtcattgcgcagcgtgcaggtgctggtcgaagccgacaagctccatgtcgcctacggcgcacaatccgtttccgtgaccacccaaggtgccttcaccggcgatgtgtccgcggacatgatcgcccatctcggctgctcatacgtcatcgtcggccactccgaacgccgcaaataccatcctgaagatgacgccaatatcgtcgatcaggtacgtgctgtgctcgccgccggcatgcagccgattttgtgcgtcggcgaaagcttcgaggaacgacgtcaaggcattgaactcgatttcgccgtgggccaggtacgagacgtcacccgcgatctcaacgaagaacaagccgccaaactcatcgtggcctacgaacctgtctgggccattggcaccggcatggtggccactccgcaatccgcccaggatgccgcaaacgccatccgcaacgatttgaagaccacttttggcacgaaggtatccgatagcgtacgtatcctgtacggcggatcggtcacctcgaaaaatgcggcggaactcatttcccagcccgacgttgacggcttcctgatcggaggggcggccctggacgttgaggaactcgccaaaatcgctcgactggcactgaaatccacgaaatcacggaactaataccacggttttcccgtgtgtgcgctatgctggtcaacagtccaatcaatccggaggtaccctgtgaccgctcttaagatcacgctgcaagtcatcgtcgtgctgctcagcttcgtgctgaccctgctcatccttatgcacaagggcaagggcggcggtttgtccgacatgttcggcggcggtctgacccagaacgccggtacttccggtgtcgccgaaaagaacctgaaccgttggaccgttatcatcgctctggtgtgggtggccttgattatcggcctcgacatgatgaccaagttcaacctcggctgatcggcttgcacgccatatagacttgtcgctcgcgacccatgaccgttaccgtcggtcatgggtcgtatgcgttctatcgagtattacgaaaggacatcaccatggtcactatgaaccgcaacaaagtcgttatcgtcggcaccggccaggtcggtgccaccgccgccttcggcatcgtcacgcacggcctgtgcaatgagcttgtgctcatcgactgttccgccgccaaggccctgggggaggcccgcgacctcgatgatggcagcgaattccaggaccgccacgtcaaggtgcgcgccggcgactacgccgactgcaaggatgcggacatcgtcgtcatcaccgtgggccgcaagccgccggccaactccaaccgcatggccgaactcggcttcaccgtgggtcttgtgggcgaagtggtcgacaacgtcatggcctccggttttgacggcgtgatcgtcatggtctccaacccggtcgacgtgatggcttggtatgcctggaaacgttccggtctgcctcgcacccaggtgctcggtaccggcaccgcgctcgacacctcgcgtctcaagaccatcatcggcgaagagaccggcctcgacccgcgcaacgtgggcggcttcgtgatgggcgagcacggcgactcccagttcaccgcatggtccaccgtctcgctcggcggcaagccattcgcccgcttcctggccgacaaccaagaccgtttcgcctctgtgtccaccaccgaaatcgaagagaagacccgcacccgtggcaatgagatcgtcgcggccaagggcggcaccaacttcggcatcgcctccaccgtggccggcatcgtacagaccatcctgtgggacgaacgccgcatcgtgcccgtctccaccctgttggacggcgaatacggcgaacatgacgtgttcctcggcgtccccactgaactgcgcgccaatggtgccaacgagatcgtcgaactcgatctgagcgaggacgagcgggccaaactgcaccattccgccgaactcgtgcgtgaacactgcgaggggctgctgtgattctcgacgccatcacgccgaaacaaccccgactgctggtcgccgacctcgacggcacgttgctgcacgacgccgaggtattcgaggaccggttcatcacccagcgcagcatcgacaccatcaaccgcgcgcacgatgccggaatgcaattcgccatcgccaccgcgcggccggtgagtaccggtctccagttcgccgaaaaactgccggtggacgccgtaatctatctgaacggcgccctcatcgatttcgacccggcccactccgacttcgacctgctcacctcaggtgccacgccggccgatgagaaccatttgatcaagattggcttctcctcacggcgtgcctgcgaagtctgtctgttcctgctcgatcgcatgcccggcctgaagctcggcatcgtgatgaacgacgtgcgctacaccaacttcgatgtgcgcgtgtattggaaaactcaggccttccaatacacgaacttccacgacgtgcccgaaggcgtggcggacaagatcaccatcttccccgagcctgaacagtggaacgagctgcgtgcgctgattccgccggacttcgacatctccatcagcgaaggcgtgatgtggatgctcatgaacccgcaggccaacaaggagcacgcgctgcacctgctgtgcgagcgactggacgtgccgcttgaacagacagccgccttcggcgacgacctcatcgatatcaacatgatgagcgaatccggccggggcgtggccgtggccaacgcgaaccccaaggtgttgtccatcgccgacgagatctgcccgtccaacaacgaggacggcgtcgcccaatggattgaagcgcagttgggctgaaccggtcgagactcgagaacacgccaaaattgaacttgtgttgaaccgggggtatgctttgaaccgttgttcaaaagataaattgaactcccggttggaggcataaggatatgagcgtatcggtgtttgcggaacgtctgcgcaatgcgatgaacagcaggggactgaagcaggtcgatttggtgcacgccgccgaacatcgtggtgtaaagatgggcaagagccacatcagccaatacgtggccggcaagaccatgccccgcgaggacgtgctcgaattcctggccagcgaactggacgtcgacatgaactggctgcgcggcgaggaatccaccacgcaattgaactcggacgcctccaacagcgtcacggacggcgaacacgccgccacaccgcttgccacgggtgcctccaagccccagacggacagcgagattcccgtgggccgccgccgcaccttcggcaaatcgcacaagctcgacaacgtgctctacgacgtgcgcggcccggtcgccgacgaggcgatgcgcatggaggccaacggcacccacatcctgaaattgaacatcggcaacccggcacccttcggcttccgcacgccggacgaagtcgtctacgacatggcccaccagctcaccgacaccgaaggctactcgccgtccaagggcctgttctccgcgcgcaaggccatcatgcagtacgcgcagctgaagaacatcccgaacgtcaccatcgacgacatctacaccggcaacggcgtcagcgagctcatcaacctgtccatgtccgcgctactcgacaccggcgacgaagtgctcgtgccatccccggactacccgctgtggaccgcctgcgtgaacctggccggcggcaccgccgtgcactacctgtgcgacgaacagtccgaatggtatccggacatcgacgacatccgctccaagatcaccagcaacaccaaggcgattgtcatcatcaacccgaacaaccccaccggcgcactttacccaaaggaagtgctccagcagatcgtcgacatcgcgcgcgaacaccagctcatcatcttctccgacgaaatctacgatcgcctcgtcatggacggcctgcagcacatctccatcgcctcgatggccccggacctgttctgcgtgaccttctccggcctgtcgaaatcgcacatgatcgccggctaccgcatcggctggatgatcctgtccggcaacaagcgcattgccaaggactacatcgagggcctcaacatgctcgccaacatgcgcatgtgttcgaacgtgcccgcccagtccgtggtgcagaccgcgcttggcggccaccagagcgtcaacgactacatcgtgccgggcggccgcgtgcacgaccagcgcgacctcgtctacgacatgctcaaccagattcccggcatcaccgccgtcaagccgaaggccgcgttctacatcttcccgaagatcgacgtcaaacgcttcaacatccactcggacgagcagttcgcgctcgacctgctgcatgacaagcacatcctcatcagccacggcggcgcgttcaactggcatcgccccgaccacttccgcgtggtgtacctgccgcgcatgggcatgctgcgcgaaaccatgggggagatctccgacttcttcagctactactggcagagctgatccttggcgcaaacgaacacgctcgattgtttcgtgatatgaaggagatcttatgccggtggtgtcgcgtcgtgcgcaggaagcgctgtatcccagcgatcgcgcgaaccgcggcatggtggtccgcgctatgccaaggtgaaggcgatgacgaaggccgtggcggacagtgcggttgccaggagcagatagcacacggcggctgaatttcgagagccatcggcattggcagcgttaccgccgttatttgcgttgcgtgcagccaacgtgatggccgtaatcgccgaaagcagggagaacaatggcagcacgcacaacacgacggtcagcagtcccaaagcttcatggccgatgcaataagcgacaagacctgcattgtcagttgccgatagcgctgggcagaaatcggtgtgtctaccagtgttgtagctgtaggtaaagaacgtgatacctgaccagaacagggcaacgggaacagagcaattgcgtatggcggatgcgttgatgctgatggtgtggaacaggtcgtgcaaggaggtagcccgtataccactgcgttctggcgtgattcgattactgttgttttgcgagtcgatggtaagagaggcgcattgcaccagcgcatatgccgcaagtccaagtccgcaagcgatggttgcgccgccgctgaagttgacctcgtcggatactgaatattcggtgacgaataccggcatcacgccaatctgccatacgaacaacagtcgcgcgattcgtatccaaccgttgctcagatatgaggtgactatggcgtgcaccagccacgtcaccgcatacatcgcccacaacgttacaatcttggtattcgcactcaacaccaatatgatcgcaacagccactgccgcaataagaacactaaacaccgaacagagccgatggcgcgaaaagccctgtactcccgcaacagtcagacagagaatcgcgacaacactcagcgcagtcaccgtcataaaccacagtggtgaggtgacgcaggctccataatcgtcagttgcttggcccgagagatagtaggtcattctgccaatcgccggacaattcggatgcaacatcatgccgccccaaatgcgctcatataatggcgcgaacgatacaccggcaccactgagcgtcgcaacaaccgccatcaccatggccggaatcagcccaagctcgcgattccggccggtttccgctatctgtctatcactggtgtccatgactcaccccaccttatgccgttatcgccgtcgtcgatgatgctagtataactatggcagatgggcggagaccagcggcatacaggaattctgtatgccgctttataggagggatactgcggcagccgccatcaccgaccgaccgccagactccggcacagaccgggaagaactaccgtcgcggagcatcggcgataccaatggcaacaccgaggatagccgggaccacccagccgagctggtattgctgcaaaggcagcatagccagcgccgcgtccagccagccgatggaaccgccgaagacggcgaccaaactggagatgcaggtggcgaaggatgcgatgcccaccagcagcacggtccagaagtagacgcgcgggaatcgcgcgccgagcgacttgtgggtcagcgtcagcagtaccagcacgatggcgatcggatacagtgcggacaacaccggcacggaaaccttgatgatcgcgcttagcccggcattggacacgatgaaactgaacacggtgaagatgacctgccaggtgcggtagctcaacgttcggccggcgacggtccggaaccgagtatggaagtaggtggcgcaggtgccgatcagtccggtgcatacgttgaggcaggcgatgacgaacacgatgccaaggaacgcggtaccgaacgtgccgaacagggatgaggtgaggttggtgagcacggtcgcgcccgtgtctttggtggggtcgatggtggcgatggcgccggacaccacgcccacgtagcttagcgcgccgtaaatcacgatcagcagtacgccggtgccgagcccggcatacgcggtctccttctgcacttgcgattcgtcatcgacttgttgggcgcggatattcgcagagatcacgatgccgaagtagagcgcggcgagcaggtccatggtctggtagccgtcgaggaagccgcgtgcgatctggtttgtggagtagtcgcccatcgggttggccggggtgccgatgccgtggatcaggcaggcgatgaacaggacagcaatgagcaccagcagcaacggtcccatgaatcggccgagcactttggagagtttctcgggatgctgggcaaacaggaacgccagcgtgaagaacacgagcgagtagatgagttgggccagccagccataggaggacggtacgaaaggagccaccatcatttcgaatgaggtggtcgccgtacgcggaatcgcaaagcacgggccgatggtgagcatgatcgccacgccgaggaacaaggcgaatttgggggagacccggctggcgagtttgtcgaaaccgccggcgaaggtgaccgccagcacgccgagaatcggcaggccgactgcggagacgatgaaaccgatggccgccggtatggtcgcggaaccggcctgcgcgccgacgaacggcggaaaaatcagattgcccgctccgaagaacatcgaaaagaaggtgaaggtcatcaccaaccgctggcgtgcgacaagtttgttcattacgattcggcctttctctcatatgctcgtaccactgtagcaacaaacgaaagaagccccgaccgttggggtcggggcttctgtgagctaatcaactagtgcgctaaacacgcatcagtcgtcaaatctcaggcgttcacgcggtcgatgccggactggacgtcagacagcacggaatcccaggacttgatgaaggcagcgacaccgtcggcctccagcttgtcggtgacgtccttgaggttgatgccgagctcagccagcttgttgatgatggcgtgggactcttcgtaggtgccctcgatggacggagcgccgttgccgtggtcggccagagcgttcagggtcttctccggcatggtgttgacgatgtgcttggcaacgagctcgtcaacgtacttgcagtcggagtaggcggcgttcttggtgccggtggaagcccacagcggacgctgaaccttggcgcccttggcagccaggtcggcccaacgcggatcctcggcgaacttcttctcgaagagttcgtaagccaggcgagcgttggccacagcggccttgccctccagagccttggcctcgtcggagccgttggcttccagcagcttgtcgacagcggtgtccacgcgggacacgaagaaggaagcgacggagccgatgtgcttcaggtcgtggccgttggcggcagcctgagcgatgccctcgatgtaagcgtcgatgacctgctcgtagcgctcgagcgagaagatcagggtgacgttcacggagatacccttggccagggtggcggtgatggccggcaggccttcgagggttgccggaatcttgatcatggcgttcgggcggttgaccttctcccagagttccacagcctgcttggcggtgttctcggtgtcgtgggccagacgcgggtcgacctcgatggagacgcggccgtcgacgaagtcggtagcctcagcgatctcgcggaagatgtcggtggcgttgcgcacgtcggtggtggtgagctcgcggacagcggtctcaacgtcaaccttgccgagctccttgagctgagcgtcgtacgggccgacctggctcagggccttctggaagatggacgggttggtggtcacaccgacgacgttcttgttggcgatgaggtcctgcagggagccggactcgatgcgggagcgggacaggtcgtccagccagatggaaacgccgttgtcagacgtacgctgagttgcttcagtcatttatttttctccttatattccgtattggaacaaatctttaagtagaccccctctaacgagagggccgatcaggtggagtcttgagtacaagcctccctcgtcagagggaagctaggggactcacttggcggcttcgacttcggcgatggaggccttggcggcttccaccacgtgctcggcggtgatgccgaggtcgatcatgttctgagcgccgtcgccctgcaggccgaactgctcgatggagacgggcttgccgtaggagccgaggtacttgtaccacggcatggcaacgccggcctcgacggagacacgagccttgacagcggccggaagcacggcctccttgtactcggcgtcctgctcctcgaaccattccatggacggcacggacacgacgcgagccttgacgccctcgccggccagggtcttggcggcagccacagcccactggacctcggaaccggaagccatgaggatgacgtccggagtgccctcggtgtcgaccagaacgtaagcgcccttcttgacaccgtccttggccttggcggcggtctcggcaagaaccgggacaccctgacgggtcagaaccatggcaccaggcagggtgttcttcttctcgaagaagtaacggtaagcctcggcggtctcgaaggcgtcggccgggcgaatgacctcaagctgaggaatcgcgcggaaggaagcaaggtgctcaaccggctggtgggtcgggccatcctcgccgacggcgacggagtcgtgggaccagatgtacaggttcggaatctccatgagggcggccagacgaacggcggaacgctcgtagtcggagaacatgaagaaggtgccgccgaacggacgggtgtgggagcccagcaggatgccgttggtgatgcagcccatggtgaactcgcgcacgccgaagtgcagctggcgaccgaactcgttgcagttcggccactgcttggtggcgcactcggccggggcgaaggtggcagcgcccttgagatcggtcttgttggagccaccgaggtcggcggagccgccccagagttccggcatgacagcggcgatggcgttgagcacggagccggaggcgccacgagtggcgacacccttgccgacttcgaaggtggcctcaaggtcgtcaagagccttgtcgaagccttccggcagttcaccggccttcagacggtcgtacagggcagccttgtccgggttggccttgcgccaagcgtcgaacttctcgtcccattccttgtgggcttcgagaccgcgctcggcaaccttgcgagcgtgagccagagcctcttcgtcaacgtggaagttctcttccggatcgtagccgagggcttccttgaggccggcaacagcctcggtacccagcttggaaccgtgggaggacgggtcgttggtcttgcccggggtcggccaagcgatcagggagtgaaccttgatgagcttcggctggtccggagcggccttctcggccttggcgatgacgtcagccaagccctcgatgtcctccttgtaggagccgtcgggctggatgaagctgaactcgtcggtgtaccagccgtaggcctggaagcgcttgagcacgtcctcggccagcaccaggttggtgtcgccttcgatctggatgcggttggcgtcgaagatcacggtcaggttgccgagcttctggttggcggccagggaagcggcctcgccggagatgccctcctcgatgtcgccttcaccgcagatggcccagatcttgtggtagaacggggaatcttccttcggggtctccgggtcaagcagaccgcgctggaaacgctcgccgtaggcaaagccgatggcggaggcgaagccctggcccagagggccggtggtcatttcgatgcccggggtcaggccgtactccgggtggcccggggtgcgggtggcagcgccgccacggaagttcttaaggtcgtccagggtcacgccgtagccggagaagtacagctggacgtactgggtgagggaggcgtggccaccggaaaggatgaagcgatctcggccttcccagttgggatcattcggatcgtgcttgatgaagtgctggtacagcgtgtaggcgacgggcgccagggagatgggggagccggggtggccggagcctgccttctcaaccgcgtcagccgaaaggaccttcgccatcttgatggcgcgctcgtcgagctcggtctccttgaattcggtcatggattactttccttccaattggtcgggccgcgtatccggcttgtgccgggcgcttgacgccctcacattgcgattaccatgctagcgtcggtttgcgacgttgtggtgcaattttggcgtgttttggtagtttgtgttctgttagcgttcacagtgaacattgctacgctgcaaacgaacgcattagcactcaagcctaaggagtgctaatacaatgttctaaggtgaagtgcgccacctgcacgtggcggagccaagaaagaggcaatatttctgggttcccgcgtgtcgcggcgtggcgaaccgaccgtcggggtacgccctgagtgaaccgtgactgatatgaatatgtatgcatatatgaggaggcgcgcatgacgcaatcaagacgcatgctggtgctgcgcgccgtggtggaggattacatccgttctcaggagcctgtgggctccacttcgctgacgcgcgaccatgatctcggcgtcagttcggccaccatccgtaacgatatggccgctctggaggacgaaggctatctgattcagccgcacacttcggccggtcgcgtgcccaccgaaaagggctatcgatactttgtggaccgacttgctaccgtggtgccgctcagcgaggcgcaacgccgcggcatcaacagcttcctgtccggatcggtgagtctcaaggacgcgctgcaacgttcggcacgactgctgtccgaaatcaccggtcaagtggccgtagtcgcctcgccatcgctggccaaggccacattgcggcacgtggagatggtgcccgttgccatgaccacgttgctcgccgtggtgattaccgacacaggccgcgtggcccagcacggcctgaccatcgcatccatgcccgccgtggacgagatcaaccggctctccaacaccgtcaacgagcaatgcgacgggctgtccctatcgaaatccgcggagaccgtgcgatccatcgccgccagcgccggctacgagtcggtgcgtggcgtggccgacacgctggccgacgccttcgaatcgatggcattggacgaacgcgcgaacgaactgtacatgtccggcacctcgcacctggcccactcccggtccctggccgatctggccccgctcttcgacgcgctggaagaacaggtcgtgctgatgaagctcatgagcaacctgagcgaggagacgaatgcatccggcgtgggcgtggccatcggctccgaaatgcacacccccggactactgcatgcttccgtggtcagcagtggctatgggcgcagcggagcggcgggcgaaccggcggggaacgatcccgtaggcgaacccgaaaccgaatccgagacggagagccagacgaacgacacggaacccatcgccttcgttggctccatagggccgacccacatggactacgcggccactatggccgccgtcagggccgtagccagatatttgaccgccttcctctccgagggccggactcaagactgaccgccgtctgtggcacaatgacccgcagaccaaacgaacacaaaggatcaatcaagtggcagattattacgagacgctgggtgtggaacgcggcgccagtgacgacgagatcaagaaggcataccgcaagctcagccgtaagtaccaccccgacatcgcgggccctgagttcgaggacaagttcaaggaagtgaacaacgcctacgatgtgctgtccaatccggacaaacgccgtatgtatgattcgggagtcgacccgaacaacccgaacgccggtgccggcggcttctccggggcgggcttcggcgatatgagcgacgtgttctccacgttcttcggttccgcgttcggcggtggctcacagggcccggtgccgcgtacccagcccggccgcgatgccttggcctcggcgtccatcgatttgaagacggcggtgttcggcggcaccgcgcatgtcaagatcaatacgttctccctgtgccaggagtgcggtggctccggtgcccagggcggcgcacagccggtcacctgccccgactgccacggacagggattcatgcagaaggtcgtgcgcaccatgctcggccagatgatgacctccgccccctgtgaacgttgcgagggccacggtaccatcatccagaacccgtgccccagctgcatgggccacggccgtgtgcgcaccacgcgtaccgtgggcgttaccgtgcccgccggcatcaacgacaacgcgcgtctgcggttggccaaccagggcgaagtgggtgagggcggcggcgctgccggcgacctgtacatcgacatccgcatcaaggcggataagcagttcacccgcgatggcgacgacctgcactgctggattcaggtgccgatgagctgggccgtgcttggccacgatctgtccattgatacgttcgatggtgagaagaccgtgtccatcccggccggctgccagactgaggacacggtgacgctgaagggactgggcgtcacgaacatccgcaacaaggacgagcgcggcaacctcatcgcccacgtcaatgtgcttatccccaccaagctcaacgaaaccgagcgtggcctcatcgaacagttcgccgcctcgcacgattcaggcgccacgcacgtctcccaggcatcccgtccacaggccggtcaaaagaaaggtttcttcagcaagttgaaggacgcactgagctgagagcggatgcgttcttggctccccctctgaggggagccaagtctgttacttcagcagggagcggcacatggagcggtattcgttgacgtagccgccgccgaagaagacgcagtggccggcgatggggtagagctgccagagcgtgatgcgctcctgccatccggccttcaatggatgtacggactggtagccctcggtgatttcgctcagatagctcataccgaacaggtgcagcatagccagatcctcctcgcgatgaccgccatgtgccgccgggtcgatgagcacggcctcggactgcccggaatcggcggtccacatcacattgccgctccacagatcaccgtggatgcgcgccggcttgtcggccgcggcgcggcccatcagatccggcagcgcttcaatcacacgctcagtcaactcgacatcgcgcttatccagctcgccacgtttcacaccaaggttgaccatcgggcgcagacgtccatcagcgaaatagctgatcgggtcggtccactcgccggtatccattttcaccgggtcctgcaatggtccgaaatagcatgtgccgttatatccgtcaggcgcagacccgaaatacttggcacccgcatcatgcatacgggccagagccgcgccaaaagctcgtgccgcctgaggcgtgggggacgcgctacccacacgttcgatatccagataatccttgccccagccgtatacctgcaccacgcgcgggccgccttgcgcatgagccgctcccaaccattcgagtcctcgaccctcgcattcgaagaatccttccggtgcgaatgccctgcttttgcgatacgtggccataatgctcccttcgtcgcttacgtactatatccactttcattgtagaagctgtggatgttaccgattcttagtgttgttctacacccccttgggtagggtgttcatcgtcataacacatcaaatacttagaaatcacgaggggttatgaattttttccaagcgatcattctcggcatcgttcaggcgctgaccgaatatctcccggtgtcctccagcgcgcatatccgtattttcggcgatttgatgctgggctctgatcccggtgcggcgtttaccgccatcatccaaatcggcaccgaacttgcggtgattctgtatttccgtcacgacatcatcaatatccttactcactggttcagctgcctgttcggcaagaacggcaaggattggaaggcccgcatgggccgcggcgacaattacgccacactcggctggaacattatcgtcggctcgattccgattattatcctcggcttcactctgcagaacgtcatcgaaacctcgttgcgcaacctgtggattacggtaaccgtgctgttggtattcggcattctgctgtggatggtggatgccaaggctcgccagaacaaaaccatgaatgatatgacgtatcgtgatgcattcctcttcggtttgggccagtccatggcgctgattcctggtgtgtcccgctccggcggcaccatcaccgtcggtcgcgcactgggctacacgcgtgaggccgctgtgcgtctgagcttcctgatggccatccccgcggtgttcggctcaggtttgctcgaagccatcaaggccgtgaagaactacaaaaccgatgcgatgttccccggctgggggccgaccctcgtagccatggtcatcagcttcgtactcggctacatcgtgatcatcggattcctgaagttcgtatcgaacttctcctataaggccttcgccatctaccgcatcggtttggctgtggtcgtcgccttgctgctgattgtgggcgtgctgccggccatcgatccctccgtggtggctgcggcataagacgggtcgataggcgactcaatattaatggtgctcccgccggcgggagctgtcagcgaagctgactgagggtggtcactggaatatgccagcagaaccaccctcagtctcgctacgcgagccagctcccgtcagcgggatattgtgtatatagggctaattgcccatctggcgtagaaacgcttccgcttctttgactagttgttcagcctggggcgctcccaatgaagcctccgcctcggctttctgctgcaagtcgtagtcgtgctccaaatgctccacataatcatgaagctggtcattgcaacgaaccagtatcgatgcctgcgccttccactgttcggctttctgcttcaggtctgccgtatcgaagatgaagccgatatacttgcccaacgcatccagcaatcgtatagtgccggcagagcattcgtcgctgcccaaatattgggggatggacacccacatcgaggaatgagcaaatccttgctgcgcggcggctacatccagaacagtaggaatgcccaccgggccgttatacgaccggtctccttcgcattgacagtctccgtcgctgacggcgatgggcaacggacgggtatgcgggcaatcggagaacatcgaacctaacgtaatgatccgattgacatccagctcatcggcaatggccagactctggctacagtattccttccaccgatagtttggttcgggggcgatctgcgcatagatacgcttgcctgcgtccaacgtgatgtcgtagaacgtggtctgtggccagataagattggtgcgacccgaaacatggcacagcataggacgggcaacctgatagtcatagaaatcatcacatctaatatgacgaatctcgcgggactcatatcgcttgaccagatggcgcaccgcgttcgtcgccgcctgacaggcatcattccatccctcgaatgcggcgatcaatactgcgccggtgtccttcgctgcttcactcatacctctagagtaactggaattcattgcccgaagcgcacgctttagccataagcgagagtatgcaattacaggcgacacgccgcagctggacgaactacacgcatgtgagtatagtaaacactcgtgcttcggtagggagacctcgccaaggaaacacacgcggacatagcttagttggtaaagcgcaaccttgccaaggttgagaccgcgggttcgagtcccgttgtccgctctaggtccgtgagttgacagaccttacggtgggttagccaagcggttaggcagcggcctgcaaagccgtatagacgagttcgactctcgtacccacctctcagaccagcgaagcaattcaatgggatgaaatatgacccgggcggttggcgcagtggtagcgcacttccctgacacggaaggggtcacaagttcgaatcttgtatcgcccacgaaagtcgaagcaattcgactggatataactgaagaaccgagtattcgggcgattggcgcagcggctagcgcacttcgttcacaccgaaggggtcgtaggttcgattcctacatcgcccactggattccgcttctcacggcggattcctttgcggacatagcttagttggtaaagcgcaaccttgccaaggttgagaccgcgggttcgagtcccgttgtccgctccacaacgaaacctcgcttcggcgaggttttttcgtattggttcagatgctggtggtatttgtcgcacgcccaacctatcgtgtcctacgttgattaaccagtccaggcctgcacattagtaccgtgggccccgatagcaaaggacaaatcatggcgcaagctaccatctccataaccgtcaacggcgaagcgaaggaggtggaagcaaccaccaccggcgtagaactgttcgcggaagacaagaacatcatcgcggtcaagatcaacggcgagaaccgtgacctgtacacgccgctgaacgatggcgataccgtcgaccccatcgccctcgactccgaagacggcctcgcaatcatgcgtcactcggccacccacgtcatggcccaggccgtgcaggaagtctacccgaacgccaagctcggcgtcggccccgtcatcaaggacggcttctactacgacttccaggtcgaccagcccttcaccccgaacgacctcaaggacatcgagaagcgcatgcagcgcatcatcaagtcctcccagtccttccgccgtcgttccgtgaccgaggaagaggctctgaaggaagaggccgaccagccctttaagatcgaactgatcgaagacaaggaagcacacctcgacccggccgccgccaccgagatctccgaaaaggagctcagcttctacgacaacgtagaccgtgatggcaatgtggtttggaaggacctgtgccgcggcccgcacctgccgaacacccgctacatcaaggccttcaagatcgagcgttccgccgccgcctactggcgtggttccgagaagaacccgaccatgcagcgcgtctacggcaccgcatgggccaccaaggaagacctcaaggcctaccagacccgcctggaagaagccgccaagcgcgatcaccgcaagctcggcgccgagatggacctgttctccttcccggatgaaattggccccggcctggccgtgttccacccgaagggtgccgccgtgatcaacgctatggaggactactcccgtgagatgcaccgcaagcaccactacagcttcgtgcagaccccgcacatcaccaagggcggcctgtacgagacctccggccacctgcactggtacaaggacggcatgtacccgcccatgcacctcgacgaggagaaggacgcggacggcaacatcaccaagccgggcgccgactactacctcaagccgatgaactgcccgatgcacaacctcatcttcaagtcgcgtcagcgctcctaccgtgagctgccgctgcgcctcttcgagttcggcaccgtgtaccgctacgagaagtccggcgaggtccacggcctgacccgcgtgcgcggcctcacccaggacgactcccacatctactgcacccgcgagcagatgaaggacgagctcaccagcctgctcaccttcgtgctgaacctgctcaaggactttggcctgaccgacttctacctcgagctgtccaccaaggacccgaacaagtacgtcggctccgacgagatctgggaggaggccaccaacacgctcgccgaggtcgccaaggaatccaacctcgagctcgtcgacgatccgtgcggcgccgccttctacggcccgaagatctctgtgcaggcccgcgacgccatcggccgcacctggcaggtctcgaccatccagctcgacttcaacctgccggagcgcttccagctcgagtacatcgcgaaggacggcacccaccagcgcccggtgatgattcaccgcgccctgttcggctccatcgaacgcttcttcgccgtgctgctcgagcactacgcaggtgccttcccggcgtggctggcccccgtgcaggtgctcggcgtgccggttgccgacgagtttgccccgcatctggccggcttcgtcaagtcccttgaagatgagatggtccgttgcgagatcgactactccgacgatcgcttcggcaagaagattcgcaacgcctccaagtccaaggtgccgttcatcctcatcgtcggtgaggaagacatgaacaacaacgcggtcagcttccgcttccgcgacggcagccagctcaacggtgtgccggtggacactgctcgcgagcagattctcaccgtcatcaagaagcgcgtccaggtgaactccgccgacgacttcaacgctgctgtggctgagtgatgtgaatggtactggctcccctctctgaggggagctgacgccgtaggcgactgaggggagtcctgcatggctcgcactcccttcagtccgtttcacggacagctcccctcagagaggggagccaagaaagggtgcgaaaatgactgacgtgcgtgtcgataatccggcggactttccgcctcaggaggacacggtcgaacgactgtggactccgcagcgcatgacctatgtgctgcgcaacagcgaggatcgcccaaccaagcccaagacgaaggaatgcccgttctgcgccggacccaaaaaatccgacgaagacggcctcatcgcctggcgtggcacgcacgtgttcgccatcatgaacctctacccatacaatgtcgggcatctcatgatttgcccgtaccgtcacgtcggattcatcaccgaactcgacgatgccgaactgttcgaattcgagaaggccaccaccctcgccatgaaggtgatggagaccgtctcccgtccggacggatacaacatcggcatcaatcagggcgaggtcgcgggtgccggagtcgccgcgcacctgcaccagcatgtggtgccgcgttggaatggcgatgcgaacttcatgcccatcgtcgcccagacgcgtaccatgccgattctgctgtccgaccagcgagacgcctatgcccaggcattcgaacagctggccccgcagtatcatttgccgcttgcctgaccgggtgcggcacccgcgcaaccggttttatcggtacgcgcaataagacaatcatcggaaacattacgggtatgtctgattaacggcctacaatcgtttcgtttgacatcatccgtttcaataattgctaggagcattatgtcaggtcattccaagtgggcgaccaccaagcacaagaaggccgccatcgacgccaagcgcggcaagctcttcgccaagctcatcaagaacatcgaaatcgccgcccgcctcggcggcggcgacccggacggcaacccgtccctgtacgatgccatctacaaggccaagaaggcctccatgccggccgacaacatcgctcgcgccgtcaagcgtggtgccggtgctgaagatggtgccgccaactacgaagacatcgtctacgagggctacgctcctgccggcgttggcctcatcatcgaatgcctgaccgacaaccgcaaccgtgcggccgccgaagtccgttccaccctgaccaagggcaacggctctctggccacctccggctccgtgtccttcaacttcgagcgcaagggccagattgtggtgccgtccgagggcgtggacttcgacaagctgttcgaaaccgccgccgaagccggtgccgaggacgttaccgatgacggtgaagtgttcaccgttgtgaccggtccgtccgacctgttcaccgtgcgcaaggctctgcaggaagccggcttcgactacgattccgccgaccaggtcatgcagccgaagaacgaggtcgagttgagccttgaggatgcccgcaaggtgtccaagctcatcgacaacctcgatgacctcgacgatgtgcagaacatctactccaactggaccgcttccgacgaggtgatggcccagctcgacgaggagtaatcctcgtgattatccttggcgtcgaccccgggctcacacgttgcggggtcggcgtgatcgaagccggcgagcaccgccggctttcgtttattcacgtggacgtggtgcggtcctcaccggatatcacccaggatctgcgtctactggccatctacaacggcctgtccgagaaaatggaccgattcgcgccggacgcggtatctatcgagcgtgtgttcgcccaatccaaccgcaacaccgtactcggtaccgcacaggccgccggcctcgccatgctcgccgccgcgcaacgcaatattcccgtggcgttgcatacgcctaccgaagccaagctggctatcaccggtaacgggcaggcgcagaagattcaggtggagcgtatggtgacacgtattttgaacctcaccaaaatgccgactcccgccgatgccgccgatgccttggctttggccatttgccatgcgctgcgcccggcaggcgcattgcagggcggcgaacgcgaacaacatctgaccgccgcgcaacgccagtgggctgaggccgcacagaactccacgcgccgccgcatcaaccacgaccgaggcatgtagtatactttcgaacagttgttcgagtcttgaatcctggagcgctgaaggagtacctgtatgatcggcatgctgaccgggcgggttgaatcggtcgaaaccgataccgcattgattgatgttgggggagtgggctacgaagtgcgcatgtccgccaccgacctgagccgtctgcacgccgggcaagacacccgcgtcttcacctatatgaacctctctcaggatgccattaccctgcatggattcctggatcgggacgccaagaaaaccttcctacaactcatcaaggtctccggcattgggcctaaagtggcccaatcgttactctccacactgacgccgagtcagttggcccacgccatcgccgacaacgacgccaccgcgctggccaaggctccggggctgggtaagaagggcgcacagaagatcatcctcgagcttaagggctctattgatttgagtcagatcgagggtgcttccgctcaggcggcaacatccaagtctccggtggataccggtacggaacaggttgtcgaaggactgatttcgcttggctggcgtcagcaggacgcccagcaggccgttgccgaggcttgcgccgaaaacgacattcccacgccgcttgccaccgacgatgtgccgcgtgtgctacgtctggctttggcgctgatggataggggccgctgatgagcgagacaacggattacggagcctccaacaccggtgccaacgaagagtcgctgcgcatggtctcctcccagccgatcggcaacgagccggtcagcgacgaggagctgcgcccccatgttctcggaggctttatcggacagccacggctcaaggcccagctgcaactgttcctggacgcggcccgcaaacgcgatgtgccaccggaccatattctgctcgccggccctcctggcttgggcaaaaccacgttggccatgatcgttgccaatgagcttgaagtgccgattcgcgtgacttccggccctgcggttcagcatgccggtgatcttgcttcgattctgagctccctcgacgtcggcgaagtgctgttcatcgacgagatccatcgtctgccgcgcgccgccgaagagctgctgtatatcgcgatggaggacttccgcgtcgatgtgatggtcggcaaaggcccgggcgcaagctccatcccgctgaccctgccgcgattcaccgtcatcggtgctaccacgcgcgaaggtatgctgccaagcccgttgcgcgcacgcttcggcttcaccgcacatctcgacttctatccgcacgaggagctggaaaagctcatcgaacgttcggccaacgtactgggcgtaaaccttgatacgggttccgctcatgagcttgcgttgcgttcgcgcggcacgccgcgtatcgccaaccgattgctacgccgtgtacgcgactgggccatcgtccacgacctgattgtggtgcggccggacgacgtcaaggaggcgctggccctgtaccagatcgactccgaaggcctcgaccggctggacatcgccgtgctcaatgccatcgtgcgcaacttcaacggtggacccgtgggcctgaacaatctggcggccatggtgggcgaggaatcggaaaccgtggaaaccgtgtgcgagccgtatctcgtgcgcgaaggttttatgattcgcacgcccaaaggccgtgtggctaccgagaaggcatggcagcatttggggattacgcccaaagatgatgtcagcaagctcttctagactttctcctgtttgcacactcggcagcgtttcgtcaatgtcgctcgtttgaaggagttgtttcgtggaacagtacattatgctcatcgtgatcgtcgtcgtgttcggcggcatgatgtggtggcagtccaagaaggccaagcagcaacagcaggagaagcaggacttccgtcgcaatctgcagcccggcaccgaggtcatcaccatcggccaggtgatcggcaaggtcgtcgaagtcgacgagcagtatgaggagatcgtcatcgactccgaaggctccaagctgcgtttcggcttcaatgccatcgcccgtgagtacatccgcccggcctatgtgtccgatgatgaggtcgacgagaacggcaacccgctgcccgacgaagacaccgaggctccggctaacgatgaggctggtcaggttccgatcgaggcgtccgtcgtgtccgaggaagacaccgctgacgagaccggtgacgacaacgaaaccaagacgaagtaagctgttcgattcggtagcaccatccgcgtatcgcatcgcaaaggcataaaaggggcgagcactatggcacagtcggacatcaccatcgacgcattgagcaaggtagggcaacaggacgccgaatatctggtgtccttggtgcgttccgtaccggggtttcccaaggaaggcatcatcttccgtgatttcatgccagtgctcgccgaccccaagggcttgaagattctgctcaaagcacttgaagaggccctgccggtgtccccgagcgaattcgactccattgccggtctcgaatcgcgcgggttcctgttcggcccggtcatggccgcccatttgggcaagggtttcatcgccgtgcgtaaggccggcaagttgccgcctgaaaccatcggtgaatcctatgacctcgaatacggcacggccagtgtcgaaatcgaaaccgacgccgtacaggcagggaagcgagtgctcatcgtcgatgacctcatcgccacgggcggcaccgccaaagccgccaccgaccttatcgaaaaggccggtggcaccgtggtgggcttcagtttcgtgatgcggctcgatggcctcgacggtctggataagctcgacggcaagcccagcagctcgctgatcgcgatgccggcctgagatttcgtctcacccaacgtacagtcagttttcaaggtccggcatgtactgtgtacagttacatgccggaccaattacatagtcagggaaggatcgatggatctttacgaataccaggcgcgtcagctgctcgaggaacaggacattcccaccccggacgccatctttgcccagaactcccatgaagtcgctgaagcggcggacaaaatcggctatccctgcgtaatcaaggcgcaggtcaagattggtcatcgtggtcaggccggcggcgtcaagatcgcccataaccgcgacgaggcgattcttgaatccgagtccatcctgccgatgaccatccacgggcacaaggtttccggcgtgcttgtggccgaagccaagaacatcctgcacgaatactacgtgtccatctccgtggaccgcacctcgcgcgacttcgacgtgctggccaccgccaacggcggcaccgaagtcgaggaaatcgccaaggaacatccggaggccgtcaagcgcctgcacatcgatgcgctcggtgacttcgacctggccgctgccaccgaaatggcacagagcatcggcttctaccacgcggacgtcgatcaggccgcacagattctgctcaagatgtggcgctgcttcaaagacaacgacgccacgctcgtggaaatcaatccgctcgccaagatcggcgacccggatgacgaatccaccaagcagctgagcgccttggacgccaagatctccttggatgacaacgcctccttccgccatgacggctgggcgcgtttcgtggatcccatcgttcccgaccccttcgaacagcgcgcccgcgaacacggcctgcactacgtgcacctgcacggcgaggtcggtgtgatcggcaacggtgcaggactcgtcatgagttccctggatgccgtctccggcgctggcgaggaacagggcaccaacatcaagcccgccaacttcctggacatcggcggcggcgcctccgcagccgtcatggccgaaagcctggagatcgtactgtccgaccctcaggtcgaatccgtgttcatcaatgtctatggcggcatcacctcctgcgtggaagtcgccaacggcatcctcgaagcggtcgccaagctcggcggttccaagccgatcgttgtgcgcttcgatggcaacgccgccgccgagggtctgcatatcctcgcctccgccaataacccgaatatccatgtgtccgaaaccatggaaggcgcggcagccaaggccgcgcagctcgccggtgaggcgacccagtccaaggaggttcgctgatgctgttcatcgaagacggcgctcccgttatcgtccagggcatgaccggccatcagggcatgacccatacggctcgcatgctcaaggccggcaccaatatcgtcggcggcgtgaacccgcgcaaggccggcacatccgtcaccttccccggtgccaagaacggtgccgacgcggacatccccgtgttcgccacctgcggcgaagcacgtgaagccaccggcgccaaggccagcgtggtgttcgtgccgccgaagttcgccaagtccgccgtggtcgaagccgtcgaagccggcatcgaactcatcgtggtcatcactgaaggcattccggtggccgattccgcatacttcgtcgaactggcgctcaagaagggcgtgcgcatcatcggaccgaactgccctggtctcatcacgctcggcaaccccggcgtcaatctgggcatcatccccgacggcatcgtcggccgcggcccgctcggactggtctccaaatccggcaccctcacctaccagctcatgggcgaattgtccgatatcggcttcaccgcatgtctcggcgccggcggcgacccgatcgtcggcacgacgctgctggaagccctgcaggcattcgaagccgaccccgacaccaaggctgtcatgatgatcggcgaaatcggcggcttcgccgaacaggacgccgccgcatgggccaaggagcacatgaccaagccggttgtcgcctacatcgccggtttcaccgcccccgaaggcaagcagatgggccacgccggcgccatcgtctccggaggcaagggcaccgcccaggacaagaagaacgcgctcgaggcggcgggcatccccgtgggcaagaccccgggccaggccgccgaaatcatgcgtgacgtactcgccaaggccaacatcgactgatcggttccaaccaatcgtgatgaaagccgtgattcgccaatgggtgcggggagccatagtcgccctcgcatccatggccatctatgccgttgcattaggctgctatacagcgctgatgttattggtcgtctctatggaagagggcggcgacaatctcaccgtcggcacaacctcgctgacacaggccgttgtgcttctgagtgagggatcgggctttagaaccgattcgttcaccctcaccattacgccattgctgttgaccatactgctgatatggctgatcaatgcactcatcatgcgaatcaaagcatacgggccgcatgcgtatgttgccggattgattgtttggctcgggttgaacgaggcattccggcaatccgtgcacctaggtcttgtcgatgaccagtggctggtgttgctgaaagcagccatcgtattctcgatcggtttcctatgcgcagccgtaccggaatcagccaaaatgcgagcattcagggactggactcgcaagcaggtgccggcggacatacgccactgcctgaaaatcggcgtcgccttggccgtcgcgatactgagcatatatctggcaattggattgattaccgtcatcgtatggtcggtacgcaaccatgccgctgtcgtatcgttgttcgaattgtccgggatggaaaccggttcacgaattctcaccaccgtcgccatgctgatctggctacccaacgtcatgctctgggctgtttcctggctcttcggcggcggattcgccatcggtgatttggccagtttcacattatggctcggccaatccaaagagcttcctgcaattccggtattcggtattctgcccgaaccggtcagcagtgaactatggcgtaccgttgccttgaacgcgcctctcgccatcgctgcgctcgtgggcctgctggctgtattcctaccgcaaggattcgcctgcagaccgttgaatgtacggaatacgtccacccgcggcccggtactggtttcgctgatctactccgccggggcattctgcctgagcgcgatgctgatctcactggcatccacattgctgttcgctctgtccaatggatcgcttggcgatcatcgtcttgctcacataggcgtcgacgtcatggcctccaccagagtcgtcggtcattcgaccgcactgggacttaccgcggcatggctgctcgcgctgattggcatagcgctcgtttttccgatagtctggttggttgagagaatcaaggattcccgcaccaccgccgcgacatcgaagaccgccaccgttcatcaggcgcggttcctagcgtcacaaccacaagaatccaaggaggaacaggatgacaaacacgaaccgaccgatacgtcgagcactggtctcggtctttcataaggaaggcatcgaagtactcgcggaagcgttcgtgaaggccggcaccgaagttgtttccactggttcgaccgccaagaagcttgccgaactgggcgtcaaggtaaccgaggtgtccgatgtcaccggattccccgaatgcctcgacggccgcgtcaagacgctgcacccgtacattcacgccggcattctggctgatatgaccaaccccgaacacgccaagcagctcgaggagttcggcatcaagccgttcgacctggtggtcgtcaacctgtacccgttcgccgacaccgtgcgctccggcgccaacgaggccgataccatcgagaagatcgacatcggcggtccctccatggtgcgcggcgcggccaagaaccacgccaccgtggccatcgtcaccgacccggccgattatgcactggtcgcctcccgcgtggccgacggcaccggcttctccttggacgagcgcaagtggcttgccgccaaggccttcgcgcacaccgccgcctatgacgccaccatcaacgagtggaccgccaagcactggcccaagccggcctctctggacgccgtcgaggtggacaaggacgatcagggcactgaagtcgatcccgccaagttcccggcccagttcacccgcacctgggatcgtgcgcacaccctgcgctacggcgagaactcccaccagcaggccgccctctacatcgacccgctcaaccagaccggtttcgcccacgccgagcagctcggcggcaagccgatgagctacaacaactacgtggacgcggacgccgcctggcgcaccgtatgggatatggctcccgccattgccgtggccgtagtcaagcacaacaatccgtgcggtctggccatcggcgcgaccgcggccgaggcccacaagaaggctcacgcctgcgacccgatgagcgcctacggcggtgtgatcgcctgcaactccaaggtcacccttgagatggccgaaagcgtgcgcccgattttcaccgaagtcatcgtcgcccccgactatgagccggccgcgctcgaactgctgcagaccaagaagaagaacctgcgcatcctcgaggtggccgagccgccgaagggccacgaggccatccgccagatcgatggcggcctgcttgtgcaggacactgatctgatcaacgccgtcggcgacgatccggacgcctggaagctcgtggccggcgaggccgccgacgctgacacgctgaaggacctcgtgttcgcatggcgtgcaatccgctgcgtgaagtccaacgccatcctgctggcccacgaccaggccacggttggcatcggcatgggccaagtcaaccgcgtggactcctgccatttggccgtcgagcgcgccaacacgctggccgatggtgccgatcgcgccaccggtgcggtcgcggcatccgatgcgttcttcccgttcgccgatggtgcccaggtgcttatcgacgcgggcgtcaaggccatcgtgcagcctggcggctccatccgcgatgaggaggtcatcgaagcggccaagaaggccggcgtgaccatgtacctcaccggcacccgccacttcttccactgatcgggactctctgaggggagcagctcagccaaaacgcacaaaggtgggattccgcctgacccgtcaacgggtccaagcggaatcccacctttgctattcgcctgctattgtggtcacgtaaccgttcgacagaaggaatcgcaacatgcacaaccatccctatgtatccgaagcacatgagggcaagccatggtttgaatggtgcgtactcggcgtcgtcgccgtcatcacactgctggttgctttcggatatacgatggccgccacggtcatacttgccgtgacggccatcatcaccgggcttgttcgcctgattcttcaggacagaagcccatggaaagtgcgctcagtggcgttcgactccttcatcggcatcgccttgggaatcggcctgctgattacctacttcagcttctttggactcttcggcaacatctttttccgctgaatcgccatcagacgaggcggcctgatcgaagaattcgccatcgtcgagcgtgtccgcgtttgcatcggcatccgtctgcggaagatcggcggcagccggcactttgggagtggtcatcatctgcgcgatgatcatgaccaacgccaccacagcggcggccaagaccgggctaatccagaatacccacagctgctgcagcggattttgcgtaagaccctcattcatcgcggccagtgcgatgccggtggaacgggcgggattgagaccggcaccggtaaccgggtagctgatggcggtggccagaccataggcaagacccatggcaatgacatgacggtccgaggactcgccgtgatcacccagagaagacatggcggtggcaacgacaatcagagaggcaacgacctcgacgacaatcgccagcgtaatcgagaacgtaatgccatactgggtcagcagcgagtaagacacggagccgttctcgaaaccgttaacggccggagtcagccacactttggcagctacctgctcggatgtgggcagcagcttgaccacggcgaagccggcggcgatggcaccgatgacctgagcggtcacatagaggatgccatccaggattttcgtcttggaaaccagcacggaggctacggtgatggccggattcagctggccaccggacacgcgggagaagatggcggtgactgcggcatatgccaagccggtagccaacgcgaagaacacgatattgatgccatacacggccgaaccccatgtggagaaggcgtaaatggcaaagcacagcaggaagctgccggccaattcggcgcacacgcgcagggccagcggctgttgcttggtttcttccatgattgttcattccttttcatctgttggaagacgggcgaacccgcacaaacggttgccagtctagcagcagtcctacgttgcggtatgatatataggttggaattggctgggattccagtccgccaactctgaagtatgtatacaaatcgacagtctctgcgatgacagagtctgtccggccacgttgggagaacgatgccaaacgcatattcccgcgctgcgaaagcgcaagacgattccaattccattcgactccagaagctgcttgcccaagcgggattcggttctcgccgcaagtgcgaggacatgattaccgaaggccgtgtcgaggtcgacggtgaactggtcaccgagctcggaactcgcgtcgacccccataagcagcaggtgcgcgtagacggttcgcgcgtacgcgtcaatccgaaccacgtcactctggcactgaacaagccccgcaaggtgctctccgccatggacgacccgaagggccgctacacgttgcgcgacatcgtgggcgacaagtacgagcgcatcttccacatgggccgtctcgactacgattccgagggtcttatcctcatgacgaacgacggcgaactctcgcagcacgtcatgcaccccaagtacgaggtcgaaaagacctacgtcgccacactggaaggcaagatctccggcaccgtatgccgtcgactcgtgaccaccggcgtacagctcgacgacggctggatcaagctcgaccactgcgcgatcatcgactcctcacgcgaccacacgatggtcaaggtcgtgctgcactccggcaagaaccgcatcgtgcgccgtatcttcggctcaatcggcttcccggtcaagcgcttggtgcgcacccagatcggcccgatcaaactcggtgatttgaagcccggttcctaccgcgtgctgtcccagacggaagtccgttcgctgtccaaggaggttggcctgtgattcgcgttgccatcgacggccccgccggcgtgggcaagtcgtccacgtccaaggcgctggccaagtatttcggatacgcctaccttgacacgggcgcgatgtatcgtgcctgcgcttggtggtgcctgaagcagggcatcgatctggacgccgaaaccgtggatgagcgtgtcatcaccgaagcggtgggcgagttcttcaccggcgaccatttcgatatctccgtggacccggacaacccccgcgtattcgccgacgacgaggacatctccgaggccattcgttcctccgaagtctccagccatgtctccaaggtgtcgaacgtcatcccggtgcgcaacgtgctcatcgccgcccagcgcgcctacatcgcccgcgaagcgtcggccgactccttctccgggggtttgggcatcgtggccgagggccgcgatatcaccaccgtggtgtccccggacgccgaggtgcgcgtgctgctgaccgcccgtgaggaggtccgtcaggcccgtcgcaccggccaagccgtcaagggcgtgggtgctgaggatgtggctgcgcgcgacaaggccgattccaaggtcaccagcttcctgaccgccgccgatggcgttactaccatcgacaattccgatttggacttcgcccacacgctcgatctgctcatcggtctggtcgaggacgccatcgagaaccaggagtacgagcagtatgccgccaatctcgaaggctatgagctggacgaaggcgatgaggatctgatttccggccgcggtttcacggaaggcgcgcgcaaggccggccccaagccggtgggtgtgctggctgttgtaggccgtccgaacgtgggcaaatcatccctggtcaaccgtatcctcggccgccgtgccgccgttgtggaagacacgccgggcgttacgcgagaccgtgtgagctatgacgcggaatgggccggcaccgactttaagctggtggacacgggcggctgggaagccgacgtggaaggcattgaatccgccatcgcctcacaggcacaggttgccgtgaccttggccgatgctgtggtattcgttgtcgatggtcaagtgggcatgaccaccaccgatgagcgcatcgtcaagatgctgcgtgccgccggcaagccggtcgtgctggccgtcaacaagatcgacgaccaggccagcgaataccttgccgccgaattctggaagctcggcctcggcgaaccatactcgatttccgccatgcacggcaggggagtgggcgacctgctggacgtcgcgctcgacaagctcaagcaggccgagaagacttccggctacctcacgccttccggcctgcgccgcgtggctctggtgggccgcccgaacgtgggcaagtcgtctctgctcaatcagctggcgcgcgaagaacgtgccgtggtcaacgatttggccggcactacgcgcgaccccgtcgacgaaatcgtcaacatcgatggcgaggactggctgttcatcgacacggccggcatcaagcgacgccagcacaagctcacaggcgcggaatattattcctctctgcgcacgcaggccgccatcgagcgctgtgaattggcgctgatcctgtttgatgcttcgcagccggtatccgatcaggatttgaaggtcatgtccacagccgtggatgcgggccgtgcgatcgtgctcgtgttcaataagtgggatgcgatggacgagttcgacaagcagcgtctcgaacgcctgtggaacaccgaattcgaccgtgtgatgtgggccgagcgtgtgaatctgtccgccaagaccggctggcacaccaaccgtctgacgcgagccatggataaggccttggaatcctgggatcagcgtattcctacaggcaagctcaacgccttcctcggcaaaattcaggccgcccacccgcacccgttgcgtggtggcaagcagccgcgaatcctcttcgccacgcaggcatccacgcgcccgccgcgtttcgtgatcttcgccaccggcttcctcgagcacggctaccgccgctacatcgagcgttccctgcgcgaggaattcggcttcgaaggcacgccgattcagatctccgtgaacatccgcgagaagaagaagcggaagtgacacgcgcgtaatttgccagatttcaaatatctggtaaattatctactcggtgcttttgcaccatcgggccgtagcgcagtttggtagcgcacttgactgggggtcaaggggtcgcgggttcaaatcccgccggcccgaccgattagccccggaattctgccacttttgagtggttgtcttccggggtttttccgttttcagacaatatgagacaacatgacgacggacttacctttgtaagccattcgtaatgaattatcaccgacaattcaccgcctccgcacccccgtcgtatgcgtttgccccaaacaggggctagactggttcctattgatttgacgaaagggacccgaattgacagaaataaacgataaggcccaactggatatcgccgccgctgacgacaccgacgccgttacctcggacacccccgaagaaaccgtaaacacccccgaagtggatgagactttcgagctttcggccgccaagatgcgcgagcatggcatgagcgaaaccgccatcaaccagttccaccatttgtatgacgtatggcgccatgaagaagcctccagctggattcgcgaggacgacatcgagccgcttggccacgtgcccagcttccacgacgtctatgagaccatcaaccacgacaaggccgtggacgccttcgccaagaccgcattcctcaagctcaatggcggtctgggcacctccatgggattagacaaggccaagtcgctgttgccggtgcgtaggcacaaggccaagcagatgcgcttcatcgacatcatcatcggtcaggtgcttaccgctcgcacacgcctgaacgtcgaactgccgctgacgttcatgaactccttccacacttcggcggacacgatgaaggtgctcaagcatcatcgcaagttcagtcagcatgacgtgccgatggaaatcatccagcatcaggaacccaagctcgtggccgccaccggcgaacctgtgagctaccctgcgaacccggagctggaatggtgcccgcccggccacggcgacctgttctccaccatctgggagtctggtctgcttgacgtattggaggagcgcggcttcaagtatctgttcatctccaattccgacaatctcggtgcgcgcccctcgcgtacgttggcccagcacttcgaaaacacaggtgccccgtttatggctgaagtggccatccgcaccaaggccgatcgcaagggcggccatattgtacgagacaaggccactggtcgcctaatactgcgtgaaatgagccaggtccatccggacgataaggaagcggcccaagacatcaccaagcatccttacttcaacaccaactcaatctgggttcgcatcgacgctttgaaagacaagctcgccgaatgcgatggtgtgttgccgttgccggtgattcgtaacaaaaagaccgtgaatcccacggacccggattccgaacaggtgattcagctggaaaccgccatgggcgccgcaatcggtctgttcaacggttctatctgcgtccaagtggatcgtatgcgcttccttccggtgaaaaccaccaatgatttgttcattatgcgttccgatcgattccacctgacggacacgtatgagatggaagacggcaattacatcttcccgaacgtcgaacttgatccgcgatactacaagaacatccacgatttcgacgaacggttcccctacgccgtgccatctttggccgcagccaactcggtttccattcagggcgactggacattcggacgtgacgtcatgatgttcgccgacgccaaactggaagataaaggcgagccaagctatgtgccgaacggcgaatacgttggtccgcaaggcatcgaaccggacgattgggtgtgatttacaacacggtcgaacgataaaaaagatattatttttgtgaaatggcgctcaagtgcggaaaaagcctctaagatagagtgagtgtggggaaactcatacgcacttataacgaaacagtaactatacgtgaggactaatggcagagggcacaagcggacgtcggcgtttttccgacaaatggggcaagcacgagctggacgtactggctgtgttgtcatccgcgttcccgcaatggctcacatcccgccaaattgcgcagcgcgtcaaggcttacgccgactcgtatggagagctggcagatcaggccgccaaggccgcgttcgccaagcagttccagcgtgatcgcgccaagctcgccgctatgggcatcgccatcgaatcacggcagcctgagtattcgtccaagtcggaaggccaggacttcgcgtcctaccgtctgcagttgggcgacgaaccgcgcgtccgtctgatgttcgagccggaagatatgccggtgcttgccgccgccaactatctggctcgttcgatgtcgatttcctccgagccggatcagtcccagctcgcccaacatgcgtcgcgcaccacgccgcgtgtgccgcagacccctattcccggtctcggtttggattcgattgcgcctggcttgggcacgcagcccattccagactcgctggtcaaggttatcgattcgcgtcgctttgccgccaccgttgatgtggacggcgaacacctgaacgtggcctacaccgattccgacgatttggccatgtttgtgctggagcatccgggtgccacgattgtcagcccgcaggaggctgtggacgcctatcatcgccgcctgcacgccgccagccgattcactttggccgacgaatccgccagccctgtaagcgcctcggtggtttccccgtcgattagtcgcgatgttcgtgagccgggtgatcccgagtcgatcaaggcccagaacaagaagaacggatccgctttccaaacgggcagcgaggtggatcgtcgcctgcgtctgatgctgttcctctccgctcacttgggtgaggaattctcgatgagcgagctggccgagcgctttatcggcaaaccaaagaacgacgacgagctcaagaaattcgtcaacatcattcataaggacatcaacaccctgaccaccgtttccgacgatggtgagatggctggcagccagttcttcgatatcgactggccgctgctggatgccgagggtattgtttccgccaccaattcgttgggccttgaacgtcttgccggcatttcgccgcaatacctcagcatgctcaccgcctcggtcagctacttggcgcattcgccgttactgccggacaagcagcgtgggcaggccgaatccctgtatgagcgtttgcgccgccatgtcagcccgggccagaccccgtggctgagcctgaccggctatgagctggagccccgaagcttctccatcgtcaagcgcgcgatcaacaccgattcgctgttggacatggagtactccgacggtaccggtagtacccgtcgcaagctggtggcccccgccaagatcttcattgacgaaggcgtgtattatgccgccgtctacacggacgttggttccgccgcacccaaggacaaaaaggcctacgtctccaaagacaagaccatcgacaaggcgaacggcaagccgcgcatctggcaggtgctgcgcttggcccgtatcgaaaaggcggaactggtcaagcccaccaagcagatcaacattccgaacatgccggtgagcgaattgcgcaagtggagtttcgacaacggcactgacgcggtgttcatcaccgatcagcgcgatctggcattcatcaagacattgccgggcgctaccgtcgaacaatgcggtgccggtgaaaaggtgcatctgaccgtttcctccgactcttggttcgtggccttctgcatcgcacacgcgcgtcatatcacggcggtcgccccggaaacgttgcgcaccatgatcgtggcacgcgccgaacgcgaactgagcgtcagcgagaacaagtaaggagcctttcatgccttggtggatatggctgattctggccctgttcatgctggccatgattgttgccggactcatctatgcagcccttcatgggctccgtgccctgaaagacatgtccgacatcggtggccaactcggtgaacgtgtggccgcgatgggggagcccggcacttctgccgacaccagcgagccgcctctgttcactcagccgctcagcgtggcacagaatcgttatgccgaggcccatgcggacgtgattcgcagcaaggccgccaagcgcgagcgccgcacccaggcatgggcccgctggaagcgattcaacaactaacggaaagcagcaatggcacgtcaccaacaccataagggcaatgccgattcccagacgctgagcccttcgcagcggtacgcatcattccagaaagtccaacgccatcgggcgtccgcagcagcgcgattcgccgaatccctgcctttcgaactggacgatttccagaccgaagccaatgacgcgctcgaagccggcagcaacgtactggtcgcggccccaaccggtgccggcaaaaccgtagtggcggattttgccatttacctcgcccaggaacgcaacgtcaaagccttctacaccacaccgatcaaggcgctgagcaatcagaaataccatgatctggtcgacgtgtacggcccggacaaggtaggcctgctcaccggcgacacctcgatcaactccgaggcggacatcgtggtcatgaccaccgaagtgctgcgcaacatgctctacgagcgttccaccacgctgaacgcactacgctacgtgattctcgacgaagtgcactatctggccgaccgattccgcgggcccgtgtgggaggaagtcatcatccacctgcccaagacggtcaagatcgtcggcctgtccgccaccgtgtccaacgtggaggatttctccaactggattgcctcggtgcgaggcgacaccaaactggtgatcagcgaacaccgccccgtgcctttggaacagcacgtcatcgtgcaggcggacgaacacaccgagcccgaggtgctggatctctatcgccgcgacggcaacggcgagcaggccaccaagctcaacgccgaactcatcaaccggctcgaccagttggaccgcaaggccgcacgccggcgcggcgaggaacgtcccgataagcgcaagggcttcggcagagaccgcggcggcaaaggcgccaagggccatgccccgaaagcggaacgccacaccccgcgccgctgggccgtggtggacgagcttaacttcctgggaatgttgcccggcatctacttcatcttctcgcgcaacggctgtgaccaggccgtggaacagtgtatcaatgctggactggagctcaccaccgatgaggaagtgaccaagattcgccgcatcgtggatgagatggtggaggggcaactcactcaggaagacctgaaagccctgcagttctccaagttccgctttgcgttggaagaaggcttcgcttcgcatcatgccggcatgattgccctgttccgccagatagtcgaacgattgttcgaagaaggtctggtcaaaatggtgttcgccacggaaacactggccttgggcatcaatatgccggcccgctgcgtggtggtagagaaactcgagaagttcgacggtaccggtcatgtgggcctgacgcccggcgaattcacgcagctcaccggtcgtgccggtcggcgcggcatcgacaccatcggccacgccatcgtggtcgaccatcacggttttgtacccgccacggccgccgcgctgtcatccaagcgtgtctacccgctgcactcgagcttccgacccacgttcaacatggccgtgaacctgctcaactccagcgactacgagaccgcgcgcgttaccctggaccagtcgtttgcccagtgggaggccaacgaatcggcctggcagctggaatcgcagatcaacacactgaagaacgcactggccggatacgaacaggcgttcgcatgcgaacacggcgacttcaaacagttcatgaccctgcgtatggagctgagcgacatcgaaaaggaaggccgccgcaaactgaagcacgaagtgttcctgaccgatcaggagcgttcacgcgccttccagaaccttgaccagcgcattcgcgatttgcgcaaggcggaacacgagcatccatgccgcaactgcccggacctccagcaacacctcaagtggggccaccgctgggcccgcgagacccgcgaactgcagcgcgtcaccgatcgctacgactcccgtaccgggtccgtggcacgtcagttcgattgcatctgcgatattctcaccgggcttggttacctcgaacgtcatgtcaatgcggccggccacattgacatgacgttgactgaaaaaggtctgctgctgcgccgcatctacagtgaacatgacctggaactgtgcgaggcgctgctcgccggcacgttcgacaagctcgacgccaacggactggccgctgtgctctcttcactggtatacgaggccagacgcgggggagacagcgaaccgaggcactacccgggcggcatctccgggcccatcgccatcgcttcgtccaagctcaagggcatttgtgaagacatcgatatcctgtgcgaggatcacggtctggacgagatgcagcggccggacttcggtattctcgacgtcatgtatgaatgggcggatggcggttcgctgggatcgtgcctgtacggcaccgacatgaccggcggcgacttcgtgcgcactgccaaacgactggctgacgtgctgcagcagatcgctgtcgcccagccgctgccgttcgacgggggagagcggctggcaggcctcgcccacgaagcggccgaccgggtcaatcgtggcgtggtggcctactccggcgtggactgacgggggccgtttgatgggagtttgtcagccggcgtcggaagcttggaatagcggccaagtccgaactgttgcgtaaattagtagggttaaagatctttcaaggaggatgccgatatggcagaacgtagcctcaggggcatgagcatcggagcgaaatcgctggagtccgacgacaacgtcgatttcgccgcacgaaacgatgtggcgtatgtatgcccgaagggccaccgcaccatcctgccgtttgccgagggtgccgaaatcccggacgagtgggagtgccgttgtggttccgtggcccaccgtgagggcgacgccgaccgtgagggcgacgaaatcagcaaacccacccgcacccactgggacatgctgctggaacgccgtagcgaagaggaactggccaccctgctcgaaaagcgcctgcaaatgcaccgtgacggttggattcctgactacgagtgatctcctactgaacaacacgtgaacttgatgcccagtcatcccgactgggcataatcattgttggaacaagtcgcatatcgtttgacgaccattcaaagcagtcgacatgaacaaaggggagtggaatctcaatggcacagcatccgatgaaagtggtcctgttggatctcgacggcacgcttaccaagtccgacggcggcatcatcgcctccgtcgtcaagacgttcgaggaattgggtcgcccggttcccgacgatgccgagctgcatcgtttcattggtccggccatcatcgaatcgctgcgacgcaaccatgtgccggaggatgagcttgaccgggcggtcaccatctaccgcagctactatgcggatcgcgccgtgttcgatgatccgaacgagcccggcaacaaagttcccggccgcttggtgaacgtcgtgtttcccggtatccgcgaacagctgctcaagctgcgtgccgacggctattatctggcgttggccagctgcaagcccgagtaccaatgcgttccgatctgtgagcatttccatctgaccgagctgttggacggcatctatggcgcatccagggataactctcgtttggacaaggatcaggtgattcggtactgcttcgacaaaatcggttttgatgctgcagcgggggacaaggccgtgatgatcggcgaccgctacaccgacatcgacggcgcccacgcctgcaatctggacgccattggctgccgctggggctacgctccggccggtgagatggaagaacacggtgcctacgaaatcatcgagaagcccgagcagatcgaagaagccgtaaaccgttatttccaaacacactgaaacacaacggcgaggacttcttcatgatgggatgcgatggagcctgcgccgcgggcttcgacctggttttcatcggtttgccattgctgtcgctgtatgagattcccatgctgatatggttcatttggcgagcattccactggaaacgagatgacaaggattggctgaaaggcacggcgattcttgcaattgcggtggtcgctccggtgctcctttggctgtcggcctggtatgctccggtgctcctttggctgtcggccttggtatgcgtggactagttgatacaggcgaccgaatccttgtcaaggataactaatctgacataacgtacattatcggctaatagtacgtggtgattttagccgaaccagtagtatctagttgcggattagcctcgccgcagagaatcggctacttcgcaacatcatccttattccggtgagaagcaacgcccaaacgcttgtccatttcggtttccgaagcgttgcgtgcctgcagatacatggcgatgagttccagcagcaccagcgcgaatatgatgattgctccgggcaattgcgcgtggtcgtagaacgcgagcatgcgagcattcatcagatccgctgtaaacgtcaacacgggaaacgggatcagcgccgccgcaaacgacatgaaatgcgttttcaccatcgaccagtcgaccggatcgaccggcggtcgccggcgtttcggcgtgaacagatgacctcggctgaccgttatagtgatgatggacacagcaaagatgacggcgaccatccacagaacgcccggcaacaatccgacaacaatcccgttcacccggtcctccaatcagtcataataatcaccgcaacatataaaaacataagatggcaggcaacaaaagcaacacatacaacaaagcgacctgccgaccaaagccggcaagtcgccaacaaccatacatgtatcaggcggttgcgcgttgcaagcgctgtgcctcgagcttcttgcgcatcctcatggcagtcagttcatcaatcggacggcccgtggcaatcgtcagcggcttggcctcaagatcaacatattcttcctgttccaaggccgtctcaatctggtgccacaacgaacccaccgacacggcgaacactgccttaccgctttgcaacagttcgagcatctgttcgctggttgtgcattcatgtacgttttgaccatcgcacatgatggtcacattggccagctgatcggtgctgcgttgagtcaagaatccgatggccgccgttacgttctgcagattcacaccggcatcaagcaacttcttggatacagcgagaatcaccacatccttaaacgagtatagtcgtcgtgaaccggagccatgagacggcgtgatggacggctcaacaatctgcttgcgtgcccaataatcgagctgtcggtacgtgatgccggccaccttggaggccacagtgccacggtagccgcgcttgatctcctcagtatcgacgttggagaacaactccccctgaatcgcgtcagcgttcagattctgacggtcctcaagcgaaacatgaagatgcagcccggtctgtcccatggcactcccctaactcatgcgtgtctcgcatatgactcacactggtgtaatcacatgattgcaatttctgcaatcagtctaaccccgtgctgggtgtggactattgggaaataatggcagatttcgtgaagaacacgaggcggaatttaccgatcatgatttcgtcgccgttcttcagcgtcgcctgatcaacacgctgacggttcacgtaggtgccgttcagacttcctgcgtcaaccacaaagaactgaccgttgaccctgcggaacacggcatgctgacgggatacggtggagtcgtcgagcagaatatcagctcgcggatcacggccgacggtgatttcatcctcgtcaagcaagtaacgagaacctgagaccgctcccctggcggaaatcagcaatgccgttccctcggacaatctggtgatggtgtccagatcctcttgagtcagcggtcgatcgccggtggtggtaatgggcagtacattaatcgcgggcaggccgataatggtggtttcgcctgcgctaggaatcgggttggtcataatcccctattctaccgtctttgcatactggttttgcgtagcttcgcgtacttcgtcgataatgatgctgtcagaaggctgtacattgacgttggacccgtatttcacctggagctgagcgcccacaccgccggcgatatcgactgcgttggacagttcctgcggattgccaatggccttcaccgtgtatgtgggcttgatggtggtgccatccacgatcaaaccttcctcggcgtcctgaatgtaggtggaggtgatgacgcgcacgttattgatggcgattacctcggcaccggcattgcgaagttcctcgataaggttgaacatgattgaggcgtccactttagtcgtcaagcctcgtccgattcggatggtcacgccttgaccctttgccgggagtctgccggagatcaagccgctggtctcctcgttttgcttggcgatcttacgcgcctgctcctgctcgttagccgccgatttcagcgagttgagctggctgttcaactgggttttacgctgctcgagattggagatttgcgtattcgactcgttcagcagccttaccagttcactctcgtccatcgtttcgtacgtggatttagtgttattgatctggctcatgtaggcgaaacccaacaacgcgcacatcagagcgatgagaatcgaggatagtaaccgtgatttgttgctggcacggttgagatccttccggggcttcttacgcaccgtgggaaacgacccggtttccatccggtcgttgaccttgtcttgtgcatgctggtcgcgcattttctccagcatgttgtctgattgtgctttacgtgccatacgtcagtacccttgtcagcctcggaagatgaagcgtctgatcgcggacacgttggagaagatgcggatgccgagtacgacgatgacggctgtctgcagctgcgaaccgacgccgagctggttgccgaggaacacgagcagtgttgccgtcaccacgttggcgaggaaggagatcacaaacacgcggtcggagaagctgcgctcgaaataggctcgcgcggcacccagcagggcgtcaagagcagcgaccaccataatcggcagataaggctgcacgatgatcggaatgtccggcttgacgaacacgccgatgacgacgccgatgattagtcccagaacggctgccattattcattcctttccgcgtacttcacttcgccagtgactgctgcctcaagtgtaatcgaattggatttgctcacctgcgggtagataccggcttccttgaaggaatcgtaaagacttgcaagtttcttcttccccatcgcttcggccaaggcgctcttatcgcctatggcttcaatggtataggggctttgtatcgcggtcatgccgatgagaatatgcccgccggccttgcgtatcgaggtttgcgcgccgagcctattaccgttgatggcaatggcttcggctccgttttggaacatcagggagaccagttgctgcagatccagatcggtgatgactcggatgttcgtggaggtgccgactctcgtcgaggaggattgatccgactggcttgccgcgattggatcggccagcgtcatggtgattccttcgccttcgaccaccgtggcaccattgaccatttcgtcttggataagcgtatcgcttttcacgctgccggatattttcttggactgttcgtcaacttgggagcgcaaattattgacgtccgtggtgagttcgtctatttgcgagttgcgattctccaattgcgtggccaaagtctgccgtacctgcttacgcggatcggattgcaactgttgcacgaataggctgcaggcaaagccaacgccgacgcagatgatgaatacgacgatgcgattaaaccagatggagaaggtcgaacgatgctcatggaccagtcgtgagtcggagaacatcggatccatcggacgattgacaagatcatcgatgagctgaagcgaatcgtcgttggttttacggcgacgtctggtgcggatggcggcggcgtcatccggggaaagcgcatgatgtgattccgcgcctcggactgagtgggagaacacggcgcggcgtcgtaccggctcattctccttgggtacggggaatgagaccggggccgtggcctcaagcgccatacttctcccccagttccttgcgtagcaatctgatgccctgctcggtatagatatatccggcgagccaatacatggcgatgccccagatgccggcggccagcgcggcgatgtagagcaagtggaagaacgtattggtgcccaaatcggcgaaaatcagactgacgatggaaatcatcagcagcgcggtaccggccttgcccacgaaatgcacgggcagcggaccataaccgtactgggcaagccatagcacctgaatcgccatccacagatccctcagtcccacgataatcagcatccaccatgggatgatgccagcgacgctgagggccagaatcgagcagaaaatgagcagtcggtcggcgatcggatcaagaatctgaccgatcttgctcacttggttgaatctgcgcgcgatgatgccgtcgagtccgtccgaagccgaggaaatggcgatcagggctaacgccgcaatcatctcgtgcttggaaatcagcacgctgatgaaaggaatcgagatgattcgcagcgcgctgatcaaattgggcacggtgaaatagatgtcacgtgcttccggactgtatctggtgttgactttctggttggtcatatcgactaacagtctacatgcgggaggcttgtagagcggtaacgatgatgccgcgtgcgccgacttcgtacaaatcatccatcagctggttgaccttggccttgggaaccatgactcgcacggcgttccactgtttatcgtgcagcggggagatcgtcgggctttcaaagccgggggtcacagccacggcggcagcgaccttgctgatcggaatgtcatagtccatcagcacatactgatgtgcagtgagcacgccttgcagacggcgggtcagcacggccagacgtgagtcctgctcgttcagacgcggcgaacgaatcaggcaggcttcggagtgcatgagcggttcggcaaacacgcgcaggccggcgttgcgcagggtggtaccggtggagaccacgtctgcgatgaggtcggccacgcccagctgcacggaggattcgaccgcaccgtccagatggatggtctcggcctggatgccgtgctcgaccagatagtcatgtacgagcttatcgaatgtggtggccacgcgcttgccctgaatatcctccagagtggtgatcggggattcgttcggtgcggcgaaacggaaggtcgaggtaccaaagccgagcggcatgtgctcgagcgcggcggtaccggagttcttgagcagatcctggccggtgatgccgacgtcgatggcgccgcggcccacgtatacggcgatatcgagcggacgcaggtagaacagctcgatgccattgtcgggatcttgcacgaccagctggcgagggttggtgcgcagacggtagccggcctcggccagcatgttccacgcgggttcggatagcatgcccttgttgggcactgcgattctcagcatttgcgttcctctcacaggtgcttgtagacgtcctcaagcgtcaggccgtgcttgatcatcatgacctggacgtggtagagcagctggctcatttcctcggcggtgcggtccgcaccctcgtattcggcggccatccaggtctcgccggcctcttcgatgatcttcttgccgatgaagtgggtgcccttgtcgagctcgtcgacggtcagggagccttcggggcgggtctgggccttttcggacagttcggcgaacagggattcaaacgtcttcatgtgattcagattcttttcttgtggttattgatgaaaggtggattgcggttcaggcttggagctcaggccttgaacgcggcctcggccttggtgcggatgtcgtcgatggcttgggcaggattctcggcgccgtacacggcggaaccggcaacgagcacgtcggcaccggcctcggccacgatgtgcgcggtcttggggctcacaccgccatcgacttggatgcgggtcttcaagccacggcgggtgatctcatcgcgcaggcggcggactttggacatctggttgtcgaggaacttctggccgccgaagccgggctcaacggtcatgatgaggaccatgtcgaactcgtcgaggatatcgaagatcggctcgaccggttcggccggacgcacggcgaagcaggccttgcagcccatctcgcgcagctggcgggccagacgcacaggggcgtgggtggcacccatgtggaaggagacggaggcggcgccgagcttggcgtattcgggagcccaacgatccgggtcctcgatcatgaggtgcacgtcgaccggcagatcggtgacctgacagatgcggccgacgatcggctcgcccagggtcaggttcggcacgaaatgatgatccatgacatcgacgtggaccaagtcggcgttggcgatggccttgagatcacgttcgaggttgcagaagtcagcggacaggatgctgggtgcgattgcgatattgctcatggtttcctaccttatctgtgcaatgggacttggagccccgtgtttcgcgctgtttcggcgctgtttatcgtggtgtcacttagtgcgattggtttgctttttctggcgaagttgttcctcttcgatgctctggcgttcgagctcgtcggcggtgaccgccgcaagcccgcgcgcctgcgccttggggtccggcccgtactggtagagcacgacgaacaggatgcagccgagcacgaagacgatgatcgcggtccacacgttggtcctcaggcccaggatcaccgtggaatagttgatgcgcacgttctcgatccaggtgcggcccaggccgtaccacatcaggtacatggcgaactgctggccggccttgagccggtcggcaagcttgtggccgaggtagatgatgagcgcggcgccaatgaggttccagatcatctcgtacaggaacgtcgggtggaacagcgtggtcctgtagtccgggcattgcgcgccagaatagcagatttcggatttgccgatggcgtccgcgtcgttgagcttcaggccccacggcaacgtggtgggccagccgtagagctcctggttgaaccagttgccgagtcggccgatggcctgggccacgggcagcgcgggggcgatggcatcggcgaagatcgcgaacggatagtgcttgtgacggcaccacaggaacgccaccaaggtgccgacggagatgccgccgaagatggccatgccgccttcccacaccttgaggatgttgaccaagttgccggtgggcgggaagtagtcggccggcgtggtgatgcagtggtagaggcgcgcgcccaccagtgcgcagggcacggtgacgagcgtggtatcgagaatctggtcgaaggtgccgccgtaccgcttccaacgtgtggcgaggatccatacggccacgcagatgccgatcaggatgcagatcgcgtacatgtggatagtgaacgggccgatctcgaacttggagaaggtcggcgagggaatataagccagattcatcgtgcctctacttgctggtgctcatggtgtgtgtccacgcgcgggttgtgcttgacgctctgtgactaccctaccgtgtcacggcacaacccgcgtgaggcgcaccgggtgtttaccgggcgttgtggatgccttcggccagttcctcgctcttggcggcgagcagcttcaagccttccttcgggtcgcgtgcggtcttgttgtcgtccgcgagcagggtgtgcacgagcgcggagccgacgatgacgccgtccgcgtaggagccgaccttggcgccctgttcggcggtggacacgccgatgcccacgcacacgttctcggcaccggcctgacgggtacgttccacgaggagttcgggcgaggcgtcgatggtggcgcgttcgccggtgacgcccatgcgggcggccgcgtacacgaagccacgtgcgttgcgggccacggtttcgaggcgctcggtggacgagtccggggagaccaggaagatgcggtcgagtccgtggcggtcggaggcttcgatccactcccccgcctcgtccgggataaggtccggggtgatgagaccggcgccgccggcgttctcgaagtcgcgggcgaagcgctcgacgccgtagtggtacacgaggttccagtagctcatgatgagcggcacgccgccggcgttggccacggtttcgacggcctcgaacacgcgcttgatggtctcgccgttgttcagggcgatggaggcggcagcctggatgaccgggccgtccatgaccgggtcggagtacggcaggccgatttccacggcgtcgacgccgtgctcgaccatcgtcttgaaggcgtcaagcgagacgtccgggttagggaagccgtagggcaggtagccgatgaaggcgggcttgttctcggccttgaacttggtgaacatagcgcccgacttgctgggcttgtggctgatgcccagcggctggccggacggcgtggttgcttcgttggtcataatcaaaaatctcctcttcttgttcaggcgacagtattgccgtgggtgccggtcacatcgagcgcggcggcctggtcgtcggtcagataaccgaaccacttgccggcggtggccatgtccttgtcgcctcggccggagatgttcacgatcatcacggccttgtcatagcccttggccttcagatcggcggcggctttgtacgcgccggccacggcgtgcgagctttcgatggcggggatgatgccctcggtctggctcaggtcgcggaaggcgttcatggcctcctcgtcggtggcccagctgtagttcacgcggccgatgtccttgagccatgcgtgctcggggcccacggaagcgtagtcgaggcctgcggagatcgagtaggtgtcgagcgtctggccttcgtcggtttccagcaggtagctcttggcgccctggaacatgccgagctggccggtgccgggggcgaagcggatggcgtgcttgccggattcggggccgttgccgccggcttcgtagccgtagaggttcacgcgctcgtcgtccaggaaggcgttcatcacgccgatggcgttggagccgccgcccacgcaggcgcagatcgcgtccggatggtcgatgccgtaccagtcctggagctgctgcttggcctcctcgccgatgatcttctggaagtcgcgcaccatggccgggaacgggtgcgggcccgcgacggtgccgagcaggtagtgcgtgtccttgacgttggtgacccagtcgcgcagggcttcgttgatggcgtccttcaggatcttgtcgccaagggtcacctcgaccacttcggcgccgagcatacgcatgcgggccacgttgagggcctgacggcgggcgtcgatctggcccatgtagatgcggcacttgaggccgagcatggcgcacacggtggcggtggccacgccgtgctggccggcgccggtctcggcgatcacgcgggtcttgcccatgcgcttgacgagcagtgcctggccgagcgcgttgttgatcttgtgcgcgccggtgtggttcaagtcctcgcgcttgaggaagatacgggcgtcgagaccagtcttctctttgacaagtgcggagaagcgcggggcttcggtcagcgggctcgggcgccccacgtaacgctgctggagcgtcatgaattccttgtggaattcggggtcggccttggcttgcgtgtacacgcgctcaagctcgtcgagggcggtgatgagggcctcgggcacatagcggccaccgaactggccccaatacggtccctgatgttcgctgagcggggtcgtttcggatgctttcacttgtgctcctgcctttactagtcgttccactgcaagttcatgattgtcggcggtggccacgccctcgccgaccagtaccgcgtccgctcccgcgcgggcgtagtcttcgacctcgaccgcgccgaatacgccggattccgccaccttgatgacgtcatcgggcagatcggccgcgagttcgttgtatttgttcacgtccaccttgaggttcttcaggttgcgcgcgttgatgccgatcaccttggcaccggccttgcgggcgcgttcgatctcttcgcgggtgtgcgtctccaccagcacggtcatgccgagctcgtgcgccaggtcgagcaggtgcttgagctgggcgtcgtccaatgcggcgacgatgagcagcaccaggtcggcgccgtgggcgcgggcctcgaagatctggtagtcggtgacgatgaagtccttgcgcagcactggaatgtgcacggcggcgcggaccttgtcgaaatcgtcaaggctgccgaggaatttgcggccttcggtgagcacggagatggcgcttgcgccgcccttctcgtactcgcgggccagcgcggccgggtccgggatgtcggacaggtggcccttggacggagacgcgcgcttgatctcggcgatcacggggatgccgtcggcgcgcttaagccatcgtgtcgcgtcaatcggagccggggccgccagcgtggccttcttcacatcctcaagcgatacggtgagctcacgggtgcgctgatcctccagcgctcccgccaccagttcgtccaaaaccgacatggtcctccctttgttggtgttcggtcatgcgccactctaggtcacgtcctgtcccgattgccgaacccgtcctacattttgggctttcgcaggcgattccggcttaggcagaacattggcataaactggcacgcatgtgcagacgtttcgcgctcgacttggaatgggacgccgtggctggaccgcacaatcgacggcgcatccttgctcgccggcgtgcggaactcaggcactgcgttatcccgccgcttgcaatttcacgaggtcgccccgctgcagggcgacggcaaacgcctgattcagccgttggattcgaccgagcccatgcgcctgttttgacggaacatctttgacgagagatcgtcactgaatcaatgcttgctatatatgtatcacagtgtcataactatgaaattatattgtggaattgtggtatatgaagttcgcatgacaacgatgtcaccgttggtaggtggaccagtaggtgccgttgctgccggtggtggtgctgaactgccgatgtgattcagtccaccagcccgcgcagcagcgcgatttcgtcgcggtgcgtggtcggcgtctgctccttggtttcgagaatcatcgggagcttggccatggtcggatcgttgaccagtcgcgtgaagaacgggatgccgagctgcccttcgccgatgttggcgtgacggtccttatgcgagccgaggccgaactgcgaatcgttcacatgaatcgccttgaccctggccaagccgatcgcctcatccaactggcgcatcacgccgtcgtagtcgttctccaaatcgtagccggcatccaacacatggcaggtgtcgaacgtgacgccgacgttcgccttattctccacgccatccatgatcgtggcgagctcatcgaaattgcggccacattccgtgcctttgccggccatggtctccagaagcaccatgacgccatccgcacgctcgaacacctgattcagcccctcgctgatcagccggcagccggtctcggcgccttggcccacatgcgcgccgggatgaatgttgatatacacctcctggccggccgcgcggatggcggtcagcagctcgatgtcctcggccaacgcctcgatcgcgaatgcgcgcttggcctcatccttgccggccagattgtagacgtacggcgcgtggacgaccaacggcccatagccctcagccttcagacgcgcaccgaacgccgccgcaccggccgggtcgagcgccttcgaacgcttgccgtacggggaacgcgggaagaacgcgaacgcggtaccgccctcctcatgggaacgttccagcagcgcattccatccgccggccgtcgacagatgcgatccgatatacagttccatcattccaaactcctcgtgttccactcgctgttcgtgttaccgctatcatatggtaggcggcatcgagcgccgcccgcacaaccgacacgagacacaactgttcacccgaccaaaggagacccgagcatggcggcagccggcacacccaaggacgataccggccttgaacggaagatggagtcgcgtcacctgacgatgatctccctgggcggcgtgatcggcaccggcctgttcgtcagctccggctacgcgattcatcaggcgggaccgttgggcgcgatcctcgcttacgcggccggctccctgctcgtctactgcgtgatggtgtcgttgggcgagctgtccgtggccatgccgtacgccggcagcttccacatgtatgcgaagcggttcatcggccccggcaccgcgttcaccatcgccatcctgtattggctgaactgggcggtggcgctcgcctccgaattcacggccgcagggctgttgatgcagcgatggttcccgcattcgccgtcctgggtgtggtcggccgtgttcattgtggtggtgttcgcgctcaacatcatgtccgtgcggctgtacggcgaggcggaattctggttcgcgtcaatcaaggtgttcgccatcatcgcgttcattgtgatcggcctgctggcgatcttcggcgccataccgattgccggtcatgattccgcgccgttgctgggcaacttcgtggccggcggctggttcccgagcggcatcgcgccgattttctcgactttgctgaccgtggtgttcgcgttctccggcaccgaagtggtgggcgtggcggccggcgaaaccaaggatccctcgcgtgcgattcccaaggccgtgcacaccacggtgctgcgcctggcgattttcttcatcggctcgattctggtgatggcggccttgatcccctggcatcaggccggcgtggatacgagcccgttcgtgctggtgttccagtcaatcggtatgccgttcgccggcgacatcatgaacttcgtggtgttgacggccgtgctttccgccgcgaactccggcctgtacgtgtgttcgcgcatggtgtggtcgctggccaaggagcggctgattcccgaacgttttgctaggacgaatttccgtggtgtgccggtgtgggccgtgctgttcagcatggcgggctcactgctggcgttgctgtcttccgtgatcgccgcctcgaccgtgtatctggtgttggtcgccgtgtcaggtttggcgacgctggtggtgtggttctccgtatgcgtgtgccatatccgtttccggcgcgaatgggcgcgggatgggcacagcgccgatgagctcggctatcgtgcgcccggtttcccggtgctgccgtggctggccatcgtgatgtgcatcggcgcgctggtgctcgtggtgctcgatgatacgcagcgttcgaccctgtattgcatgatcccgttcgtcgcctgctgctacgcggcttattacgcactcgaacggcagcgcaaacgcgaaaacaacgcctaactcgatttcgaggggctgatttggcacttgccggagatctatctccgtttcaaggggctgatgcccgagtagacaaggctccacaatggcgtaatggcgttgccgcaaagccgtttatactcgcggtttggcgtttgagcagcccctcgaaagccaagtagatgtccccaccggacgaaatcagcccctcgaagccgagaaaccattgatggccgattatgttgtgcccagtgacgcgcctggttctatgctcgaactggtacaataattggagtttgttttttgcaaaggggcattgttatgcacaaggtgttggtgtcgttcgcagacagctaatgcgcgttgactcgtcgcgctaagccgtggtcgccgtttgggcccacggcacttctgttgtgccatttcccacgcacttggtcgaaggctggcgatgggccctgaccaaaaggaatttcctatccgcgatcatactcggtgcaattgtgaacatcgcctgcgtagccagtatcaccggcgcgcagatcatgttggccgcccgtggcgccaacgcggtcatgatcggactgctcggcacggcaatgggcgtgagtactttggtcggctcgctgttggccaacaagctagtcgatatggttcccacagggaaactgattgcgggcgcgctgacgttgttcgtggtcagccagatgccactgctattcctgcacagctacgcggccattctgatctgccagattctggccggcctgccgttccccgcgttgaacgctggcctgctgggctttctctacggcaagacacccgacaacatgcaggggcgggcttctgccgtatttgaaaccacggtcggcatactgggcgcagcatgcccggcgatggtcggctggctgttgcaacagccagatctcggtttcacggcggtgatggccgtagccgtggtctgttccgtagcgggattggccgtatcgttggccggcccgctgcgcagcattccgaatcccgaccagtggtcggaggttttcctgtaacgccaagcagcggagcgccggtttatatcaggtcgtacggcatctgacgcttgaccagccagaagatgccgaggccgatgaacaccagcagattgaatccgccactatgccaccacaccacggcgatcagcgtcgccatgcgcgccacatagaacgccacgcgaagccacccttcgcgcggccgggtctctatcgtcatgtgcgtgaagctgccgccgagcgtgcagccgccgcgcaaccatggcaccacgccctcgaagaggatgagcgccgccaggaagaggatcgagccggtccagtcgaacggttccatcgactgccatgagccgttggagcccgagggcaggtttgagcggacgatcatgacgaacagatgcgtcggcatcacggcgaacccgatcagcgtcatgtcgatgatgaacgtgatcagccgcctcatgaagccaggtgtggtggtcggcgtcatatcggcgacccgcgccggaatcaggcgcagcgaaagcatggccagcgcgaatccgatcagcgcgccggtcgtgttccacaggagatcgtccacgtcgaacagacggtaggcgcacgggaacacgcccatgaggccggtcagctgcatcgtctccagaaacagcgacgtggcgaatgacagtactgcggtaaccggcagcggccaacgccagatacggcccatgatgaagcccaacggcaggaagaacacgatattaaacgcgatttgcagtacagcggtgagaccatcggtacggatgtcaccgatgaactgcaatggattgagctgtggcgtcagatggtgcgcagcgcaataggctgccgcatcggccggcatcggatacagtgtgaagcacagcaggccgagcaggtacagcaccgtgccatacgccactatggccgacgacagtcggatgcgattgtcgcgatgatacagcaacgccagcaccggcaccgtcagcagcatggacacaaacggccacaatgccagcgcgaacgcaaacggttcggaaaagttcttgagaaatcccatcttcaatgctccctgcttcggtccgctccattcggtttcggaccatatctctcgacttctgattccaaggtacggaacatgacggcacgcgggtatcggccacgagagcgaaatcattgggatgaaaggcgattcgtatcattcgcatggatgagggaggtacaccagttgtgactgacaattgcggcctgcgaaccggcaggatgaatgggactgacccaactggcccgtctcatcttgtagggtgtttcgtgctcttgtaggcagatgattccaatggcgatgatcggaataccgccattgcaatgacctctcgccaaggccagctacctacaagatgctgaatctgcctacaagatgaattcgccggtgaaccatgccggcatcaccgtcgatgccgtggattgtttcgctgagcaatgcatcctgacaatcgtcgaatggctgcgtgggtaaatacttcttccttatgatgcacatatgatgtacgacttgccgttgcatgaatacgcgtatgcttcgctgccgattatgccgtggccatcgcctcgcataaagccgacaacgcccgtattgcatcgctaaaagaatagtcacgcggcatagccgtaccgctttctataagcgtcccacgggtctgatttcactctcattcatgctggcatcaccgcttcgaggtaaggacgcatcacgttcacgagccgaaattcgtgagcgtagttcatgagtttgaccaagtcagtgtgcgcggatctcatgtaattctggaaggcggattgcaaatcttgcggatccactgtgctgcgggagcggaacaaatcgcaaatggttcgttccaaatcataaacgcgaaccgtatgcccgaacatggtgatagccgacgccaggccaattgcaaagcgattgtcggccacctttctcactgttatgtcttcattcttgagacgagccgtacctgatgattgcggtaaggtaatcgtcggtgtcaggggggggctcgctccccctctccaagcaagaacaacgcagtttcatgcgaaaaaatggctttcggatatcgatactgcaattcgaacagcggatcggactccgcattcggtgaaacatataagccctttgccgctttctcaagcttggcttcacgcacgaatcgcgaaatctccgtgcgggaaactcctcgacgctccatttccgataccggaagatatcccatatgctccttcaatacgctttccgcttctgtcgctctagtggacatgggcactccttcagatgttgcggagctcggagagttgcctgaagaaaagttttgctatcgcctaacctaatgcgttattcgactccaaccgttgctcgacttcgaaatgctcgaatactatgagcgagttgtcgttcaacggaaagtttgggttggcgaattcatcgcggtattccgccgaattccagaaagattcgtgtgcgctccgccattgggccgccgtgacgtcgccttcaccctcatcgatggcgtaccggtcagtgacttttccgagcggaatcacgtcaaccgcagtggtgacgagtacggctacgggtcgttcatcggaatccaccaacaccgaatgcgcgccaacgcacggcagcggttcgacctcttcctcatattcaatcatcagcgcagcggtggcggtttttacgccgtccagaatgagcttcaccaagcgatcgcgttcaggcccaggaaacataaactccgctttgggcaaatcactggtttcaaatgccgtattgacgctcatgcaatgctccagatcgtctttatgttcaattgtgctgtgcttttcttactcccatcataatagcccgaattccatgagtttccggcgctgatccagtggcctccattacggtcaatacaacctgatgccaagcaatcacatgacaacaagtgacactgtactcacgaaccggcctactatgggcggcatgacgattcgtattgttccgattgagccgccatggtttgaggaaaaggcccaagttcagtcgtgcacgtggcgcgaactcaatcaggggcatattccgcagggaatcgtggatgcgatcactcccgaattcgcgctcaaactgacgcgcagtcacgccaaagaccccaatcaggtcgtattggtcgctttggagaacaaccacgtgattggttttgctgagcttctgcaaacgccgcgttcgccaatcaaacggtccgaggctgcggaactggcttcgctatatgtgctggaatcttgccatcgtcatggtgttggccgtgctttggttgaggcgggccaacgcgccatcggcaacgatcggctcgccttgtgggtcgccggattcaacaccaacgcccaaggtttctaccgtcacatcggcttccatgagaccggcctgactcaaaccgaagacatgggcccggaactcgaaatgatcaactactctgacggcgtattccagtgagcagcccgacctcccacacgcgtccggcgctaccatgaagccatgtctttgaacagtgagcaacgcgcggcgactatccgcgaatttcaggagaacatgagccggctgggtctgaccgccgaacggcggcagggattttggcgtcagcggcagcagagtggagcaaatcatcaccctcaagtcgggcgtgctggagtatccgtggattatccgagcctatctgctgagcagagctgagacacagggcgtggaactcacgccgttcatggcgttacgcggaaatccgcacgattattggttcctcgacggcgactttatcgaccgaggcgaaatcgattaaaaccgattgataatcggccatttacacgcaagaggcgccgtcaatcgcctcgcgcatagaggccatcgctctccgtgcaggtggcgatgcgtgtgtagtattccgtcttgtcctcatggtcgatacgtgcgccgcaatgctgctgcaccgcaagacttgccggattggttttgtggacactcaggtaagcctccttgatgccgagctcgcgggccttggcaagcgtgagcttgagcccggcggtcgcgtagccgtgaccgcggtattcgcgggcgacaccgtagccgatgtggcccggaccgttgcgcaggaagtcggtgagccggtgacgcaggttgaagatgcccacatagtcgccctcatcgttgacgagaatgtatttggtggctggcacccagccgtccggcaggccgacgccaagcgactcatcacgcaaccctcgcacatatgcggcgaaccgttcacgattcatgccggccgctgggttctcgaatcccgtctcctccgccgggaatttcgcgaacaagtcaaacgcgcgttcctggtccgccagccatgtctcgatcagccgcattggtcacactcctcctgttgacacagcagaccacactactactgtgctcggccaacggccgcaagccttatctagggtgtgtttacagataggcagcaagtgtctgtcaatgcgtttatcgcaggatataccaggttactttccccgatacacggcagcgacgccgaagacaaattgtatgatgaacaatcccagcaggaagatcagagctcctggccggtacatgcggtagaagtcgaccatatccggctgcgccaaaggcgctgccatgatatacaccagcgcagcgaacacggcgccgagcgcggaaacaaccaagaacgcgcctacggcaaaacgcagcaggccacgatccgaggtcctccggcgcagaccacggcatccccacgaagacgaataccgagatcagcaggtagaacagcagcccgtacgtgggcagcatgtcgataatcagcagatcgttcatggcatatcctttcgtggcgcaatcccattcaacctgcgcatggccaaaagcgcaacatcgtgtcaagtaatcgcatgatagcaggttttgtccggctgcgaccgtggccacgatgagcggcatgggacatgatgacatgaccggggctgcggcgcggtcgatccgtatcgcccgtattggacaatgatccgttcgccctggatgcgatgtgcgcgatgatctcggccgtatccaaggacttccatgtcatgtggggcacgggttcgcccgcggtggcgatcgagcactgccataacccgcataccaggccggacgtgccggtgtcggatcctaaggaatctgttggtgtcgctgcagctcattgccattcccactgaagagatgattggcgaaaacgatactcactacctattcattaggcttcagctcgtgttcgagcacaagtttcatcttgctgttatccatcaaccatgcgtgtaggtctcggtccaggatcatcgccagagcgaagcacgcctgcgtcgcattctccaatgcaatccgtcgattctcacccggcagaggtatgccgttgacaagcggctcatggtgagcgacccgattacgcagggcatgcactgtttttacgatatccagcgcgtactttctcgtccagcgttcttccactgcacgggcatactggcgcccattggagaatgtcttatcgagtcctttgcgccataaatcgttctcataatctgcacggcgctggtctggccacttcgtgtggattgttccgccgtcttccaagagattgcgccaaaatccgaatgtcaatgacgctatgagatggccatgcgtatgattttttcgctggtgcggggtgagatggttccacgcttcacgaatctggtactgggttcggtcatcgaattgtagccctgccatataccagtcttcagtgccattctgctccagagcgaggagggagagttgccggtccatgcggttgcgcagagcgacctcgaggatggcgatgtcgcccatacaggcgctggccatgtcgtgatcccacaggtacagctctagcgctgggcatgaacgtctttgagcctcataattgtaggtggcaagccgttcatcggtaatgcacgcgcgcagcgccttctcccgcggacttcctttccttggagtccgtgagaggaaatcagttgttgaatttgactgtcggctcatggctcattatgatatatcaagaattcccccaaagggcctctccggacggtcttcgactcagccgtgatgcactgggggtttcttttttatctggataatcggggcttggttggtctgggctcttcttcaggacaatcgcatatgtttcgggagtgctcagctttcagacgaggcattcgaagaaatgccattccgaggaatcggcatcatggatgatgatcagcgtgccgccctcgttggttatctccttatgaggccggtcgtagagcgcatcgagctgtgttcccaggttcaatcgcagggtcgcatccgcttccttgattatgcggatgttctcctggggcagttggccactggagtaatccctgccgtccagaatggtgccgtcgacttgttctgggtcagcggcgaccttcacgtaccggtatccgtccccatgaaagctttcctcgtccttgctgacgattgcccgcgcatcctcggaaaatgagatcgagaacgtctgcgacagattcgaaaccggactatagccctagtatcgagtccatccgaaccatactcccgccactaccaacgccgcgatgcccaaagcgatgatcgttccggcccggccaccggcggaaggttcacctttccatacgcggtttcccatcgtcggcctcctagccttagccgtagggtctgctagatcaaagtgtgtattactgattagcgtgaggtcgccgccactacgtgagcggtcgaaaacctcatgccacccggcaaatccgagaagcggtcggagaactattcgaagccgtcagctaatccagtgttgaacgtacgcgacgacacccagaaacgctcctatacccgctccgaggaagacgaatccccatcccaaccagtcagcaaatcgattgaccggggatttcgcaaagccctccatcaccgaattcgttccagtcgagcccttccctgattcatggttgtcctcctcggcatccctacataaaacccgttagtccaattcaactatatctgtttttcgccagctacaggagagaatcgactataactgatttccatgcgcttcttcagagaagacaagtctgttggacactttgatggactaaaggccagaacacaatggcgctagatgggacaaaaggtacattggtcctatggctaagcgcaaacatatcggcaccgtaattctcacgatactggtcgcggctctgctggcgtcgggcgtttccggctggctgttctggcagtcggtacaacgggtgatcggcgaggcgcagcaggcgggcgaatatgcggctgaagcacagcaatccgtcgggcagggcgacttcaagcaggcgcttgagcagatggacagcgctggcagtcacatcgtcgcggcgcgagacgaaacccagggcatgctatggcaggccgccgaatacgtgctgtattacggttcggacgtgaaggcggtgcgcggcatgctggatgcggccgccgacgccgcgaccaacgccctgcccaaaatcgacagtgccgcgcagggcacgttggtggacttcaatatcgaagagctgctgtccggcatgaacttctccgacggcacgctttccattcccaaaatcgcttccatcaagcaggacctgtccgacgccggtgcggtcttgaagcgcgtcaagacgtcgattcatgcgctgccgcaaccccgcacggaacagatcaccgaaatggtcaaccagggcaagcaggtagtggaccaaatcgatgagactttcgacaccttgaacaccatcgtcgaaaagattccgggctgacgttggttcgttcttgtcgtatattggcgtaacctccgcataaggctagtccatacaaatttatgtttaaatttgggataggaggtgccaatatgccgacacgcacaccaatcccggtcagtcgggcgatgcgtcagatatccgccaacctcgatttggcgcgcagacaacagcgcattcccgtagccttgctggccgagcgggctggattatccatgccaacggtcaccaaaatgctgcgtacgggtaatggcagctttgagaacttcctccgcattgctcgtctgcttggactgctggacggcgtacagcaagcgacggaccctcttaacacagatatcggcaaattacgcgccgacgaagacactccaaaacgtattcgatagtacagcaggaggcgcaacacatcatggaagcaatcgtcaccctgcagttcaacggcacagacgtcaccgtcgggaaattattcaccagtatcaggcgcggcatcgaatcggcacatttcacatacgatacggcctatatgcgctcttcaaacgcagtatccctctgtccagagatgcccctctccccccggaacgttcccggccgagcataatgcgatgcatcgcatctttcaagactgcatgccggatcgttggggcaggaacctcatgcttcgtgcagaacatcaagatgctcgttcggagcatcgcacagcacgcacactatttgagggagatctcttgctatccgtcaacgatgagacccgacaaggcgcattgcgcttctggaacaacgacggtgacgcgctagctcccagtgagaccggcggtccaagagaagtgaccattcagtcccgcatccatagcaatgatgagcagctgctttgaatccggcattgcgcggcttcgcgaagcaaacgcacaatgacttcacattcccgccttgcaccagctggctgcaatctgcgtatggtcatgtatctgtaggccggcacgaatgcggctgatgggtgcggcgaatcgtgacattgcttattacccattcgccccttcagtcgtaccattcgggtcgtcgcagttccaggaatggccgctgtttgcgcgctgctgcggtctgtgtgagatcgatgtcggcgataatcaactgttcttggtcgtcggccttgctgacgacgttgccgtacgggtccaccaccaccgattggccggcgaacgtcacatcgccttccttgccgacccggttgcacatgacgatggccacctggttctgcatggcctggacacggattttccacaggaacggcttcgacggttcggcgtcagtgttcggaaccgatgctcgccgtcggcacgatgaccaggcggcgccgcgcaacgcgcatgtgcggatgccttcacggggttcactcaaatagcgtcatccagtcgggatcgcggtgggccgcaaaacacatggcgatttgttccgcggtgtttcttgtttccgaaagccgcggcaaccggtcttcctcgaagtagcggatttccgtcgtttcgatgttggccgagaaccaaccgccggcgcggctgcacaatacgaagaacttgagcaccccgtacggataggtcagcgcgttgtgattggcgcagtcctgcaccgcgatgagtcgctcgcccctcacatcgagcccagtctcctccttgacctccttgacggcgttggaccgaatggactggttctcgtcgacccagcctccgggcagtgaccattccccgctgttctcatgcgtcatgaggatcctgccttcttcatcgaagatggccgcacgagtgtcgagtttcggcgtcggatatccggcgctgagcagtcgactcacctgtccggccggcgcatcaacctgcgtggagagcatgtcgaccgccatcgcgcggatacgctcgtagcgctcccggtcgaaggggtccttgcagtacatcagtccggtctgggccagcgcctgcaattctcgggcctgttccagtaatgtgcggttcgtggccatcatcgttcatcctgtcatcgtaaggtcttggatccgtttgcactcaggcatcgcagcgtagtgcaagcagtatagcacttcgaaccgttccggggacgagggtctcagcgcatcccccgtaacctctcccatgtgccatcaacgcttggcgagctgcacgttcttgcgctgtctgcgattgcggctggcgaccgacttttcacgctcgcggcgcacgtgggcctcctcacgcgcggccgccgcgcgctcttcttccaaagacggcaatccggaggcggcgcggtgccggttctcccgctcatggtcgcgttcggccttgcgctccccgcctcggatccgggcgccggaaaccatcgcagttggcagagcgtctggccgaagttccacaggttattggtcagccagtacagcagcacgccgaacggcaaggtgccgcccgacaccacgtagatggccgggaacacaaacgcggtcagcttctgcgtgcggaactgcggtgaatccatggcgtccttcggcgtattgcgatggatgagcagccactgcatcgcgaacaacatcagacacatcaacgccacggccacgccgatgacgacgtgcgactgcggcgagacgaccgtgccgaacgagtcggcgatgcgcacgccgaatatggacgatgattcgatgtcgcccgccatgacgcggtcgatgccgctcaacggttccgcattcccggcggcgcttgcgggcagggattgcagcgtgtagaacagcgagcacagaatcggcgcctgaatcagcgaagcaggtatgaaccgagcggattggcgttatgccgctgctgcaaagccataatttcacgttgcatggcttctttggaacgcggatccttacgcgcggcgtacttgcgttggatacgttggatttgcggttggagcacctgcatacgctgcgtcgcgcgcatttgggagaagaagagaggcaatagacagatacggatgatgagcacgaggcacataatcgcgatgcctaagctgtgcggcaccgactccttctacggcggcggcatggtcaccggccagcccatcggcaccatgatcggctctcgcatgatcaacaatgcgcaagccggcttcatcatcggcgccgtgatcatgggcttccggattcgtggcgcttgacatctgacctcgcgaggaatcctcaaaggacatggaacgcaccaagatgacgctcaaggatctcgctgtctccttccacttcccgaagttctccacctcgcgtgacttctacaaggcgttcggctgccgagtgtgcatgttgctcagctaccagatgatctccgtgtaccaactctacatcgtcgaggattacgtgcaccagaccaagaccgaggctgccggcaccatcgccaccatgtccatcatcaccatggtcgtttccctgaccgcttcgctgatctccggcccgatctccgacaagatgcacacgcacaaggtaccagtcatcatcgcctcgctgctgttcgcgattggcaccgcgatgccgtggatcatgccgagcgtcacgggcatgtacctgtatgcgggcatcgccggcttcggctacggcgtgtactcagccatcgaccaagcgctcaacgtcgacgtgctgccgaacaaggaagaggccggtaagggcctcggcatcctcaacctggccaccacgctcggccaagcagtcggtcccaccatcacctccgtggtcaagaccacgaccggcacctacacgccggcgttcgccatctccatcgtcatggccgtgtgcgctgccgtgttcgtgctgcgtatccagaaggtgaagtagccgctgcgagtgcctatctccgtttcaaggggctgattttgactttgcggaacatctacttccgtttcaaggggctgatgccaaagtagccactggttaaaaacggcggaatagcgatagaacaatgccatttctatctgcgttccgccagttgaccagccccttgaaacggaagtagacctccggcaaacgccaaatcagccccttgaagctgattttgactcagcatcatgcagcgcagctatatcctcggtgcgggtatactattccgggccgtcacgacgacgcctatggaacgcacgcacggcaaagagagaaacatgagtcagcccgacaccgacacggcggcacagtcgccgtcctcgcaacaggaaccgcagattcagacggatggccgtcgaagccattcggaacagatgaatcaaccagcgcaaaccagccagtccgagtcgtcacatgatggcaaagacgagcacgccctacataccaacctgaagcgcggcatggaatcccgccacctgcagatgatctcattaggcggcgtaatcggcaccggcctgttcctgagctccggatacaccatccagcaggcgggccccatcggcacgatcctggcatacagcatcggcgcgctgatcgtctatctggtcatgcttacgctcggcgaattgtccgtggccatgccggtgaccggctccttccacgtgtatgccgaaaagttcatcggccccggcaccggcttcgtgatcgcaatccagtattggctcacctggacggtggcgctcggctccgaattcaccgccgccggcctgctcatgcaacgctggttcccggacagccccacatgggtgtggagcgcggcgtgcatcattctcatcttcaccttaaacgccttgtcggtgcggctcttcgccgaagcggaattctggttcgcctcgatcaaggtgttcgctatctgcgcgttcatcgtcatcggcctgctcgccatattcggcgttattccgattgccggctaccagcatgctccgatgttcggcaacctcgttaaggacggcatcttccccaacgggttcatgccagtgttcgccacgattctgaccgtcaacttcgcgttctccggcaccgagctcatcggcgtgaccgccggcgagacgcgcgacccggaaaccaccgtgccgaaggccatccacaccacgctgtggcgcctggtgctgttcttcatcggctcgatcaccgtgatgtgcgcgctgatcccgtggcgccaggccggcgtgggcgaaagcccgttcgtgctcgtcttcaacagcatcggcatcccctatgcgggcgacatcatgaatttcgtggtgctgacggccgtgctttccgcctcgaattccggcctgtacgcctccacgcgcatggtgtggtcgatgggcaacgaaggcatgattccgcgctggttcgccaaaacgaaccgtcgcggcgtgccgatgctcgccttgtgcgccgcgatggccggtggcctgctggcgctcctgtcttccgtgatcgccgcctcgactgtgtacctggtgctggtggcgctttccggcctgtccgccgtggtggtgtggatcgccatcgcctactgccagatcgtgttccgtcgccgttggctggagtccggccattccaccagcgaactcaaataccgcacgcccggctatccgtacgtgtcttgggcggcgttcatcctgtgcaccgcatcgttcgtattggtgattttcgacgtggagcaacggttcgcgctcgtggccgagctcgtgttcatcgtggcctgctatggggcgtatttcctgcaacagtgggtacgcaagcgcaaaaaggcgaccgaggccgacgacctcgatacgctttgggtcgcgcgcgactgaacacatgaccatagtgtgatacacgtcacttcctgaagtacgtagtcgttatggaatcacccgcacgtttcccgtatcggagctgtacgatagctgtgagacaggggggtcgtcagatttcggggggagggttccggtaacggtccggctgcaggatgcaccggaccgtgcggcacgtatcaactcgtggattcacgccaaactcagttcagtatgccgattctcgtaaatggccagaagcggaacaacgccacaccttggatatcgtcgtatggcactagcccattgttgccgtcgtcaagatggtatcgagaatctctggaattggagcgattatcaccaagcacgaacacgttgccgtcagtaacggttacggaaaaagggctgtcgcttggattcacgccggacttaagataagcgctttcatcaatgggtttgccgttgaccgtgatgggctccccggatcccttgcaggcgacggtatcgccgggcagaccgatgacacgtttgattaggtaacgattgctgtcgattatcgacatcagattggtgggaagctgctccccctccatccagtctgcgggatctttgaacacgatgatgtcgccacggtgcagtgtaaagagtctcggagtcaatcgcgaggcaaatacgcggtcgccgatttgcaacgtgtcttccatgctgcgggatggaatcacatatacgttgaacacgaaggtacgtcccagcaacacgaccagcatcaccgcgatcactgtcagcagatagccgcgaatttcgctccaaacggagggctttcgcgcatatctcctcgactggccacgcgcttttttgctatgacgccccaccatcacatcctttccgaccgataacgcaacaccatagtcctcaaaccatgccgttacctacgcatgtttgagctcagctgtcacaccagcggttcgcgcacgtccagttcacaggcgatgccggtttccttgcgggcccattcggccgcctgcagtgcggcgatgttccataatgcgcacggcactccgccaaggtccggatgcgatgcccagaatgtgaggtcatcagcgtatgcggtgatgaccgattcttccgtgactggcataatcgtgtggtacaggcggtccgcaagcgtggccacgaattcgttggccgcggcgaacgtgtcgatgagatgctgttcggcggtcaccggcgggccgaccagctcccaggattcgacatccgtggcgctccaatgcgcggcttcgccgtccacttcacgctgcaaagagacgaacagcctggcgaactcatccgaagtcagtcccgtaacccggcgtcgggttgacaattcaatcggagtcatcagataccgttcctttcgcttcgttcattccgttgtttcgctgcttggatttgctgccagccggcacaaagcccatctcgcacacctcacgatagcccaaactaccggcatggccatgattgccagccctacgaccagtagccatgaggagccggcgtaatggcctcatcgagcattgtcggatgattcgcgtggcccacaatcgagacagtatcggtttccgttcggttcgtgcggccagactatcgcccgttcttgccgattgcctgtgagcaggttcggatagactggcgcgagaacaatgcgagaaagaggtaaggatgacccggaaacagtcgcaacagcacgacgcacaacgcaaaccgtcctggcgcgtacgctggaaaaccatgagccgagccgtgggcatggaaatccgcgaacacaaaagctcattcgcggtctatgtggtgctgcgcatgctggtgctcgccatggcaatactccagttctttaacggcgactacgaaaatgtgttcctgtgcatcctgacgttgctgctgctgttggcgccggcgttcatccaggtgcagttccgcatcgagctgccttcggtgctggaagtcatcgtgctggtgttcgtgttctcggctgagattcttggcgagatcagttcgttctatgagatcttcccgttctgggacacggtgttgcatacgatgaacggcttcctcgctgcggcgatcggcttctcgctggtcgacctgctcaaccggtccgaccgggtgaagttcgagctttcgcccctgtatctggcgatcgtgtccttctgcttctccatgaccatcggcgtgatctgggagttcttcgaattcggcatggaccagttgttcgggttcgacatgcagaaggacgccatcgtgcattccatcagctcggtgatgctcgaccccacgcacaccaaccatgcgattcgcatcaacgacattacccaggtcacggtcaatggccaagacctgggcctcggcggctacctcgacatcggtctgatcgacacgatggaggatctggtcgtcaacttcatcggcgcggtcgtgttctccgtgttcggtttcctgtacgtgaagaaccgcggcaagaaggactccatcatcagtcgtttcgtgccacgccgcaagtccgccgaccgcgattacctgcgactggtgattgatggcgggagccgggaaagtcatacaaatatgagagatacagtaatcgaacaaacgttcgactgccctgataaactggatgcataatttagcgacgacaacgacatgatttacagacgcccgaaaaaagaaaggcgatctcatgactggcgaggaactgaagcagcagattgctttgtatgagagcgcggaccacaccgtgcacctcgatgtgaaggtagacgaggacacggtgtggcttaacagacagcaattggccttgctgtttggccgcgatatcaaaacaatcggcaagcatgtcggcaatgcattaagggaagagctcaatggattttcagttgtcgcaaaatttgcgacaactgcatctgacggtaagacataccaagtcgagcattacaacctggatatgatcctgtcggtcggataccgcgtcaaatccaaggaaggcatctatttccggcgatgggccaactcagttctgaagcagcatctcgttgatggttataccatcaatcgcaagcggcttgacgcacttcacgccgtcgtcaaggtgctatcgaggtccaccgaaccggaaattgctggcaccgccgagatcttggaacgatatttgccgagtcttgtgctgcttaacgactatgacacaggcaatgtccctatacccaagggcgacgagtcccagtgggtcttgacctatgaggacgcgatgctgttcatccggtcgatgccgtatatgccaatcactgttgtgtttgcgaactccttcgctcatggtgccgaaaatgcatacatttggttattcgctgtttgcggtggggcgtgcatgggttagtgtttcgggttcgattccctgtcagaaaaaataatcgagtgcgggattacggccggtaaggctcctgtcgtggatgcggatgcgcgccggtcttacggtggtgctttcccgaaacgtggattgcacgaggtgtgggacggcacgcggattcggccgttttccgcccgccgtcccacagcgctcgctatgaacggttgtggataatcatggagctgtagcggaaatcggcgttattccgcggtttcgacagttaatagaacaaatagaacaaatagaacagccagcttaggcacggcgcggcaaatggcgcaaaccggccgcgatagtagtagcgtggtgcataccagtacaaccatgcgaggagaacagccatgatcaatgaggaatacaaggccatgcttggcggcaagtccgtgattcgcgagctgagcgagtacgccacgagccgcggtgccgaaatcggctaccagaacgtgttcgattacagccttggcaatccctcggtgccggctccgaaatccttcaccgacgccatggtcgacctctacgaaaacggcgatccggtggccatccacggctactccccctcgctcggtatcccatccgtcaaggacgcgatcgccgaaaacctcaacgaacgtttcggcatggcatacaccggcaaccacatcttcccgaccacgggcgcggcgggcgcgctgtcccacgcgatgcgtgcggtgaccaagccgggcgatgagatcatcaccttcgccccctacttccccgaataccagccgtacgtcaagggcgccggcgccaagctgaccatcgtgccggccgacaccgagaacttccaaatcaacttcgacgcattcgaggctgcacttaacccgaacgtgcaggtcgtgcttatcaacaccccgaacaacccgtccggcgcggtgtattcagcggacacgctcaagcgtctggccgcgatcctgaccgccaagcaggtcgaatacggccacgatatcttcctgatcagcgacgaaccgtaccgcgaaatcgtgttcgacggcgccacccagccctacccggccagcttctacgcgaactcgctgacctgctactcgtggtcgaagtcgctgagcctgcctggcgaacgcatcggctatgtcgcggtgaatcccacagccaccgacgccgacctgctcgtgcccatgatgggccagatctcgcgcggcaccggccacaactgcccgccgagctcgattcagctgggcgtggccaaggtcatcgaccagaccgccgatctcaacgtctacgagacgaacatgaacctgctctacgatgcgctgaccggcatcggcttcgacgtggtacgccccggcggcacgttctacatcttccccaaggcgctggaggacgacgccgtggcgttctgcatgaaggccaaggaatacgacctgattcttgtgccgtccgacagcttcggcgtgcccggatacttccgcatggcctactgcatcgacacggagaaggtcaagcgctcgatccccgtgttcgaaaagttcgcccacgaggtgtacggcctgtaaacacggaccgcaagtaacaaacacaagaaaggggttgccatggaatacaccgaagacgccgatcgtcgcgaactgctgctgcacagcgcctatgactccgatacggtccgggccatggagcgacccctgctggacaaaggcgtgccgctgatgcgcatggccgcccaggccgcggcccacatggcggccggtatgctggacgacgaggatctggcgctggaggacacgtcgatcgtgctgctggccggggccggagacaatggtggcgatggtctgttcgcggccgccgcgctggcccaggagggcgcgaacgtcaccgccatcgccgtgggccggtcgttgcatgaggccggattcgcctcattcgtgcgcgccggaggcaaggtgctggtgcttgatcccgcggctgatattcccggttgcgcgtccgggttttccgccggtgaggccggcgagcgattgcagaccgccatcgccgtggccaggaaatcgcatctgatcatcgacgcgatgaccggcatcggcatccaaggctcgctacgcggcatccccgccgcactcgcctccgcccttggtctcgacggcgaggctcccgatgagcccgccctgccaaaccgtgagtcgtcaggcgattttccgctggtacttgccgtggatacgccatccggcgtcggtgtgaacgatggttctctgcccggcccgtacattccggccacggtcacggtcacgttcggcgcgatgaagccgtgcgcggtgctgccgcccgccacgttcgcctgcggccgtatcgagttgctcgatttcggattcgatatcgacgacaaggatccggacgtcgaggtggtggataattcgttcgcgtccgacgcggtccgtctccccaggttcgaggattccaaatactcccggggcgtggttggtctggtgaccggctcgcagcgctaccccggtgccgccgtgctcaccgccagcgccgccgcccgcgcgaacaccggcatggtccggtatctgggcccggagcgcgcgcagaacatggtgctcgccgcactgccggaagccgtgatcggcaagggacatgtgcagtcctgggtcgtggggtccggcgtgcccgaggctagcgtcgagggcaccgacggcgatatgcagcgggacaccatcgccgcattgctcaagcattacgcgctcggcagcgaggatgagaacaaggacgcctacgacatgccgccaatcgtggtggatgccggcgcactcgacctgctgccggagcgtgtgcccggccaggtggtgatcacgccacatgccggcgagatggcgaaactgctcaaccggttcgaaaccgccgccagcaccgcggagcatgccgattcgcacgagccgtacaccgccgacgacgtgcggttgaacccgttggccagcgcgaagcgtgcccacgagctcaccggcgccaccgtattgttgaagggcgcggtgaccatcgtggtggatgaggaccacgtctatgcgtcgggtagcgcaccggcctggctgggcaccgccggcgcgggcgacgtgctggccggtctgaccggcgccctgctcgcccagcaggatgacgtggccaccacgggcgagaccgtggcctcggccgcctacctgcatggcctggcggcggcgatcgcctccgaatccgagcaacaaggctggcaggagccggaactgatcggccgcgagcatcgccagcgcttcatgacgctcggccacccgattgtggccggcgacgtggcccacgccatccccgaagccatcgccgacgtcatcgcatgattccgtacgttggctcccctcagagaggggagccaacgtatgaaaccccctatactaaatcgcagaccccactcaacggccccaacaacacaaggagcatcatggccaactcccccatcaccgacgtgattttcgacttctgcggcgtgctgctggactggaacacccgcgcatgcctggaaggccgattccccgatgagatcgtggaacgcatctgcgccgacgacgacccctgcggcttcttccgctacgaggaccgcatggacaccggcgaggatttcgcggacatctacccggatgtggtacgcgaacaaggccaggaactcgccgacatcttcaagttctacatcggccactacgcggacgcgctgccccgcacgcttccgggcatagtcgagctgctggcggatttgaaggcccacggctacggcgtatggggtctgaccaactggtcgcatgagaccttccacctggccttcgagaagtacccgcgccttgaacagctgttgcagggcaccgtggtctccggcgtggagaagatgcataagccgaacgccgacatctacgagctggccctgacccgtttcggcctcacggccgagcgctgcgtgttcttcgacgacaccgccaagaacatcgtcggcgccaacgaggtcggcatccacggcatcctcttcgagaacgcgttgcaggcacgcgaatcgctcgcagaactcggcgtacatctgtaagtcgccaaacgttgcatcgcggcagttgaagtctatggacccgtccttgacgacggtgaccggccgtgtggcgactatccctagcgatataaatagactttatgacactgctgcagctgaaatacatcgtcaaaatcgtcgagtgcggctcgatgaacgaggcctcccatgccctgtacgtctcccagccggccctgagctcgtcggtcaaggaattggagaacgagctgggcatcgagatcttcacccgctcctcgcagggcatcgccctgaccgtggacggcgcggaattcctgacctacgcccgccaagtgctcgaccaggccgacctgctcgaagagcgctataagcatgccaaaccgcgcaagcagctgtgccaggtctccacccagcactacatgttcgccgtcgaggcgttcgtggagatgatcaactccatcaagtccgacgaatacgagttcaccatccgcgagacccgcacgcgcgacatcatcaaccaggtcgccaacatgcagtccgaaatcggcatcatctacctgtccgattttaacaaggacgtgatcggcaagctcctgcgcgagaagcacctcgaattccacccgctcttccgcgcgccgctgcacgtgttcatctcgcgcaacaacccgctggccgccaagaaggtcatcaccatggaggacctgaaaccttatccgttcatccagtacgagcagggcgaggaaggctcgttctacttctatgaggaagcggtctggccggagtactcccccaagcagatcaacgtgaccgaccgcgccacgatcctgaacttcatcatcggcctcaacggctacacggtgtgcaccggcatcgacaacggcgacctcaacaacgagaagatcgtcaccgtgccgctcgacaccgacgaaacgatgttggtcggctggatcacgaacgagcgttccaagctctccaaggccgccgaaacctatctcgacaagctcaagtccgtagtctccgaccacggctacaagctcattgattaggagtaagtaaaacaggcatggtcagcagtgagatatactgcgattaagccaaccccgctggggaaatggaagtaagggccggctcctgagtatctcaggggccggcttttgcgctattgagactgactggcaaaaccagtttgatggcctccgactacttggccaagattaccgacgcggcggctgtcgcggcgaagcctttgagcacttcaatcatcacgtcgcgatcttcgacatcaatgttgcgggccgcggcgagcataatcggcagtgactgtgtcaaatgcgaagtgaggtcgccgaatgtgtcgtatccgccagcctcgaagatggcaaacaggttttcgatgaacttgcggcgatgctcgtcgtcgtattttgccatccatccgttgatcgtgcgtgccaggtattgcgcgctacttgtcagtccatcagcctgtacgaattggccatgatcgacttgccagtgcaatgcgaaatgctgcatgatgctggcaccgtcgctgctgaccaccgtatagccgtcttccacatgctcacgagtctcaaacagcatgccgatgatcgacgagcccggtaccgatttatgaatcttcgacgcaatgcgtacgtacccgtcctcatcgaagaacgcctcatcgaatccaggcccatcgtgcgaatatacgaccgtgatacgttcctgaatctcgctaggcacattggccgccgcatacaccgccagattgccgcctttggaatggccgccgaccataatcggcccggcccaatggccagccagctcggtcagataacgcgcggcggcctcctgcgaggcgaccgggcggcggaacgccatcatgaagtcctctttccacccgacgattgagctgtcggtaccgcgaaaagccacatagagcgtgccgttacccagttcgaacacgcaggccgagaactgcttggtggtttcggcatcgaattcgtccacgtatgcgcccacgcgtaggttcctccaacgtgggctctcgctcatcgcacgtaacagatcgacattcatcgaaggcgaccacaccttgccgaacatgtcgtcatagcattcggcacgcagcaaatcgtgaatcggaaccgtggcgatcatgccgtcggcggtctctgcattctcgtgatagcgcggcacgttatccggcatgcgagcataggccaactgggacaaagcgaggctatccgcctcggtgaacggcagttcggcgaaagtgtcgaaatgttgccgaatatcgtcggtgatgttccccatagcggccttccttgttcgaatgcaacgaacctacggtaattctacgccgagcgggttttcatcacaggcgagtcggtcccagagtttagaaccctatctcgctttcaagggagctgatttggccttctggagacatttatctccgtttcaagaggctgttcatccgtcatatcccgagtatgagcggcgtcatcccaacgtcattccgccattttcatgctgcttctacttgggcatcagcatctcggcggtcttcttcattaccttgcgacaacttgttcgctttgctgtccagatgatgctcgatgccgaagtaactgcatatccccacgagcgcaaacagccctatatcaactaaccagttcatagcacgctccttgccaaagcttttgccttaatatggtgctgctgttcatggaacgtaataaaaaaagcgggctcgcaagcccgcttttggtttttagattgaagacgatcaggcgccgtattcctcaaggtaggcggcggcgcgctgctggatgtcgtggctgagcagcggggtgccgtcggggttcttcatcttggcggcggcgtcgaagatctcgcgcacgttggcgatggagagcaccgggaagccgaattcggcttccacggccttcacggcggacatgtcggagtccttggtcttctccatgcggtccacggagagcacgagacccacgacctcgacgttcgcctcggccttgagtttggggatgacttcgcgcacggcggtgccggcggtcatcacgtcgtccacgagcagcaccttcatgccgtcggtcagcggggtgccaaccatccagccgccgtcgccgtggtccttcttctccttgcggtcgaaggtgtatccgacggtcatgttgtggccggcggtcagcgcgatcgcggtggacacggccagcggaatgcccttgtaggcggggccgaacacggtgtcgatgttgcggggaatcgtgttgtgcacgatggcctggctaatcttttcggcgtagaacgcgccgagcgcggcgatcttcttgccgtcgtcgaaggcgccggcgttgatgaagtacgggctcttgcggccggacttcagcgtgaagtcgccgaacttcagcgcgttggattccaacaggaattcagtgaagcgatgtgcgagtgtttctgccatgatgttccttacctccaagtctgtcctgcggccagtttagcagcgagttcgggacggctgtccaacaggtcgtcgagttcgcgggcgacgcgcagcggggccaccgggtcgaagagcgcggccgcacccacttcgacggcgttcgcgccggcgtacaggtattcgagcgccttctcgccgctgtcgatgccgccgaggccgatgatcggaatctccggcagtgcggtgcgcacccgatagacggctgccaggccgaccggcagcacggccgggccggatacgccgccggtgacgttggcgatgatcggcttgccggtgcgaatgttaatgcgcatgcctttgagcgtgttgatcatgctcaacgcgtcggcgccatgttccacggccgcgcgcgccggcacggtgatgtcggtgacgttcggcgtgagtttgacgatcatcggcttgtcggtcatcgggcgcagccggtccataagattggcgagggccaccgggtcggtgcccacgctcatgccgccggcggaaacgttcgggcagctgacgttaatttccagcatgtccgcgtcggagtcggcgagcttttccacgaccgccgcgtaatcgtcatcgcaatgtccggcgacattggagatgacgaacgcgcccgcggccttgagcttgggcaggtcctcggccaagtaatggtcgatgccgggattctgcaggcccacggcgttgatgttcgcggccggcgattcggcggtgcgcggcgagggattgccttcccacggtacgggcgaggcgcccttggtgcatacggcgccgagctggctgacgtcgtagaaccagcggacggcggcgtactggaaggtgccggaggcggtgccgaccggattcttccattccagaccggccaccttggtgtggtgcttccacacgtggggctcgtacaggttgatgtggttgtcgccgccctgcgcggactggttgtttgcgctcatcgtcacttcccccatccgagctgttcgcgggtgaacacgggtccgtcggagcagaccttgaggcggccgtccacggtgtcgatggtgcacagcacgcaggtgccatagccgcagcccatgcgctgttccatgctcagctgcgcggggatgccgcgttcggcggcccagtcggccacggccttcatcataggcagcggtccgcaggacagaatgatcggcttgcgatcgtaggccttcaggtcgtcgccttgttccagtttgttgagcaggtcgaccacgttgccttcggcgtcgtcgatgctccacgaccagtccgcgtaccgggagacgtattcctcggcgaagtggtcgttgcggtaaccgaatacggcggtggcaaaggaggcgtcgtgttcggcgagcttttgcgcggcgtagattagcgggggcacgccgagtccgccgccgacaagaatgtagttggcgtcttccttgaggttgaagccgcggccgagcgggccgagcacgtcgacggtgtcgccggcctgcagtcctgccaactgttcggtgccgtgtcccacgacggcgaagatcacgctgacttcgtcgccgtcgacttcgctgacgccgaacggacgcggcatgagcatgaagtcgtcgtgcgtgaacaggttgacgaactgggcgggcttggcatgggaggcgatgaacgggtcgcggaacgtcagtcgcatcacgcggtcggtcagttccgtaacctgcgtgatttcgacgttgtggcgcggcgggaagaatccggccgcagtcgcttccgtaaccacatcatgggtgggggtgaaagttgtcatttcattcctattcagcacatcaagctccccctatcaggggagcggtcaaccgcaggttgactgagaggtagttaaacacactcggctccggtttccagcccacactcacgtatagcccacagccggacaatctacctacctatatacggcaacccgcagattatcgcgcatgtcgagcgccgcctggcgcgcgctgctcgccacaaggtccagcgcctcgtcggcggtcatggattcggagtacttgccgctcttcttccatgcgccgataatgccgcgcgacgagttgacgatggcgccgctgccctgcttgtcgaacatgcctgccacgtccgcggccgtgccgccctgcgcaccgtagcccggcacgaggaagaacgtgtgcggcatacgttcacgcaacgccttgccttcctcggggtgggtggcgccgaccaccgcgcccacgcgggagtagccgtggctgccgatggtctcggcgccccatccttccacaagatcggccacgtgctcgtagaccttcgtgccgtcggccaggtcgagcatctgcagttcgctggaggacgggttggaggtgcgcacgagcacgaagatgtccttgtcggcttcggcggcggcctcgacgaacggggtgatgccgtcggtgccgagatacgggttgacggtcaccgcatcctcatgccacgggtcgaagtcgcccacgccgttcaggtggtgggcgtaggcggctgcggtggagccgatgtcgccacgcttgatgtcgccgagcacgtagaggccctgctgggccgcgtattcgcaggtcatcgtgtagatgtccacgccggcggggccgagcgcctcgtacatggcgatctgcggtttgacggcgggcacgatgtcggcgatggcgtcaatgatcgtgcggttgtattcgaagtaggcgacggccagctgcgcggattcgacttcctccggggattcgaccgagtcacgcacctcgtcggcaaagctcgccacgacctgcggcggcaccagcgcctcagtggggtcaaggcccacgacgctggggttctgagtgttgtcaatcgcttcgatcaggcgatccatgctgctccttgtgttatctacagacggctgaacatcagctgggagccgatgattgtggcgagggggcgtccggtgacctgccagccgccgaacggggtgttacgagccttggagtggaactgttcggggtccacggtccattcctcggcggcgttgagcaccacgaggtcgacattgtcggcgtcatccacgcggctcaagtcgagcagtcggttgacgccttcacgctgcggctgagcgtcgctctcccccgcaatcacgccatccggatcatccccggtgggcgcgggttcggcgtagtcctcgaccagcgcggctacgtcggttggcacatgccccatgagttcggcaggtccaacggacatgagctcgatcagacgctcatcggaaatgaagccgccgtcgacgagcaccttgtggcacacgccgtacgcgcattccagtccgatgatgccgttgggcgcctcaaggaagccgagttccttctctgccaacgtgtgcggcgcatggtcggtggccagcagatccacggtgccgtcggcgatggccgcgatggtggctttgcggtccgcttcggagcgcagtggcggattcatcttggcgagcgtgccgtacttgagcagcgcctcgtcgctcaacgccagatagtgcggcgcggtctcgcaggtaatcggcagtccttcggccttggccctgcgaatcgcctcgaacgagatggcagtgctcacatgctggaagtgcacgtggacaccggtgcggcgggccgcttcgatatcgcgggccacgatcttgagctcggtgtcttccggaatgccgggcacgccaagctcgcgggaaacggggccttcgttcacggcacctgtatcgtgatgctcgcaatgctcgatcaggtacaggtcggaggccttgacgttctccagcacctggtccaggatctccggcgtcacagcggaaccgtcgtcgctgattgcggtgatggggtgcgtgagcatggccggcgtcttggcgtcgtcctcgaatccgggcacgtacttgagccaatcggcaacgtcgcttgcctcatgaccggcgcgatccttggacgcgcacacgcacagatcgtaacgaaccggcaattgaacgtcatgcgcagtatcgtactgctgcaggaagtcgatgacgttgtcgaagccggcatccagaacctcttttgcaccggtcgcttccgggccagacacggtctgcccatccagtgccggcaacgtgttcggcatgatgagcacgttcgtgtatccgccggatgcggacgcacggcagccggagaccatcgattccttgtaggtctggccgggatcgcggaagtggacgtgtgggtcttcgaaaccgggggccacggtcaggccggtggcgtcgatgtcggcgccgtcagccacgacggaggtgtcggcgaagtaggcggcagcggtcccgggcaccacgaggtcgatgacctcgccggtgttccagaccttgatgttgcgtagggtgatgctcacagtttggcttcctcgtcgcagtagtcgcagcggtattcgagccgctcggagtgcacgaggtggaacatctgcttgatgccgggctcggcggtggtcacgcagcgcgggttcacgcaggaaatcacgccgacgatgtgctcgggcaggttcggctgcttcttttcgacgatcttgccgccgcgcaccacgtccacggtggcttggcgggccacgaagccgagcacgtcgaggtcgatgtccttgtcatcttcgattttgatgatgtccttggagccgtaacgcttggagtcggcgttcatgatgagcgcaagcttggttttggccgggtcgattttcaggtattcgagaaccttcagcgaggttccggccggcacatggtcgataatgatgccgttctgaatgctggtgacttccatcaggcctgaacctccttggggttgagcggttcgtatccgggcagttcgtcgcccaccacggtgctttcgagggccatgcgcacgagcatgccgttcttgacctgttcgaagtaggcggcacgcgggtcgtcgtccacgtccacggcgatttcgttgacgcgcggcagcgggtgaagcacggccatggacggcttggcgagctgcagcttctcttcgtcgagaatgtaggtgtcgcgcaggcgcaggtagtcgtcttcgttgaagaagcgttccttctgtacgcgggtcatgtacagcacgtcgaggtcgccgatcacggaggccaggtcgcgcacttccacgtaggagcagctgtcggtggcgttgatgcggtcgatcacgtactgcggggtcttgagctcgtccgggctgatgagaacgaagcgcacgttgccgaagcggcacagggtctcgatcagggagtgcacggtgcggccgaaggtcaaatcgccgcacagtcccacggtcaggtcggtgatgcggccgaagcgcgactgcagcgtggccaggtcggccagcgtctgcgtggggtgcatgtggccgccgtcgccggcgttgattaccggcacggatgcggcgcgggaggccaccagcgcggcaccctccttcgggtgacggatggcgaccacgtccacgtagttggacacggtcttcaacgtgtcggcgatggattcgcccttggtcacggaggccagctgcgcgccggcgaatccgatgaccttgccgccgagacgtagcattgcggtctcaaagctcaggcgcgtacgggtggagggctcgtagaacagcgtggccagcactcgcccatcgcaggtatgggcaatctctttgcggtgggaatcgatgtattcggccttatgcagcaggtcgagaatctggtttgtagacaggccgtccagcgttacgacgcttttgccgaccattggcgtttcttcagacaaggctcaccttttcgctcgtggttttcaggtggccacccttgcgtgacctaatctaacttacgccatttttcggacagccgcattcaccgagtgtccacctgaaaatccaacgaatatgctgccttatcgctgcgcgcggcgtcgatttcgttccagtcgcggtgcgatcacgtgcatacgcgggcgaggggcggtttgcggctgctgcgttgcggcggaggccgtggcggtggttgccgcagccgcctcgccttcggtcttcccatagaacaagcgctggcatacgtcacggcatttgcgcatcacggccagcaggtcgttctcgaaatgctggccgcggtgggcgccgtagccgaggtagacggcgatgccgcccagcgaatagatgtcatcaggcagaatatcggcctggttggcgcgcccgctccacagatagctgccgttgcgggccgcggtgcacaacgtccatgccttgcgcagctgaatcgcgtcgatagcgctgatgagcttcttggcttccagcacgtccaatgcctccagcgtgccgttgacgcgcagatctttgatatcgccggcgtgctggagctgcatgagttgcacggtccattccacgtcagacaagccgcccttgccgagcttcagatgccgttcacggcgcacgccgcgcggcagacgctcggcttccatgcgggccttgagcttgcggatgttctgcaattctgcttcagtcagttccgtggtcgggtagcgcagcgggtcggcgatgttgatcaggaagtcccgcgccagttcagcgtcgccggccgcgtaccgggcgcgcagcagcgcctggcgctcccaggtcgaagcccaggattcgtagtattcctcgcaggaggcataggagcgcacgagcgggccgttcttgccttccgggcgcaggtccaggtcgagttcgatcttgggttccagcgtcgtcggtccttgcaggatgttgcgcaggtcttccacgaccttcttggcgaaggcgttggcttggccgtcgtcggcatcgtcggccggacggtagatgagaatggcatccgcatcggagctgaagttcacttcgcgcccgccgtaacggcccatggcgatgacggtgatgccggccggcgcggtttcgacgccgaactcggcgatctgatggcgcacggcccaggtcagggaggcatcgatgatcgcgtcatacacgtcggtcatggccttgagactgtcggagtcgctgatcacaccgctcatccaagacaggccgatgcgttcgatttcgtggcggcgcatggcgcgcatggaggtggcgaactcgttgatgttcgagccgaaacgttccagcgccgagccggtctgcacgtccaaggcctcgcgcgtgcgggcctgcagattgtcgtcgtcgccaagccagctgatcgattcgaccgacttgttgagcgcgtcgcccaggaatcgtgagttggacaggatgtggcacaggcgctgggcggcggaggtggagtcgcgcaggaagccgaggtagccggattcggtgccgaagttctcctccagtttgcgccagttgagcaggcccatgtccgggttctggccctcgcccagccactgcaagacggcgggcagaatgatgcggttgattttggccgcgcgccccacgccggcggtgagcgcctgcacgtggcggatggcggcgtccgggtcgccgaaaccgatggattcgaatcgttcctgtgctgcctcgacgctcaggacgatctggtcgttctccatctgggcgttgaccggcagcatcgggcgatagtagatgtcgaggtgcaggtggcgtacttcgcgacgggtgtcgtcgtatttgtcgacgagttcttccgggtgcaggccgaatgcgcgggcgaggcgacgcagctcctggttctggttgagctcgtccacgtcgatgtcgcgcttcttttcgaggcctccgaccgaggcccggccgaggtccgggaacaggtgcgtgcgcttcagggaccagatctgctggcgatgctccatcacgcgctcgaagcggtagtcctgggacatgcgcacggcctgtttgcgcgagacgtagccgccttcggacaggcgctgcagcgagtcgagcgtgttgctggtgcgcagcgattcatcggtacggccgtgcacaagctgaagcatctgcacggtgaattccacatcgcgcagaccaccgcggccgagcttgatttcgcgatccttcagaggtgcgggaatcagatcttccacgcgcttgcgcattttctggcagtcgtagacgaagttcttacgcttggacgcgctccacacgaacggccgagtcatgtccatgtaggcccggccgaggtcggggtcgccagccaccgggcgggccttgagcaacgcctggaactcccagttctcggcccactgctcgtagtagttcttgtgcgaggagagcacgcgcaccagcgcgccgtccttgccttccgggcgcaggccgccgtcgatctgccacagcggctgctcggccacgcccatgatggcggactggcagacacgctgcagcatggtgcccatcttggtgcccacgcggatcagcgtctgatggtccacgtccttgtcggccggttcaaccacgtagatgaggtccacgtcggagacgtagttcagttcctgtgcgccgagtttgcccatgccgatgatggtgaagcgcacgtgctcgctgccctcggtttcgtggcgggcgatggccagcgcgccttcgagcgccgcgtccgcgaggtcggacagttcgcggctgatggtcggttggatggaggccgggtcgtccgccacggcatcctgggcgatgatggcggccagttggttccggtagctggaacgcagggccgtggccgcttcggccagatccttggaggcgacgggcatggccggttcgtccgggtccgcgccgaccgccttgagcagacgtgcacggcgttgcgcgtgattgaacagatggctgttgcagttgtcgactgctgccgcctccacaagctgcggcttgaagcgcatgaacttgcccatcgcgtcggagacgccgagcaccgtgaccagacgcttcagggcgtcgttgtcggggatgacgtgttccagatcgcgctggctggattgcatcgcgttgacgatatccacgaaattgctcaatgccatatcggggtcgcaggcgtgggccagcgcgctcagcagttcggcgcatcgctcatcgggaatgtcgtccgccttgagctggtcgaacaaggcgcgggccttgtcgaggtcttgcagacctgccctgatgaggtccatggagctgggtttgaagatcgacgattccataagattccactatatacgctcatgccctccgaatggggcatgagccgggaaggagtcatcgggcgacgctgatgagctccgaggaatccatatcgtaatcggccatggcgtaggaacggatggcggggtcatcataggtgttcatgtaataggtgttggtcttggacgaatatccgctggtgaacagcgtgcgttcgaactggccgtcgcccatcttcgccatgccgtccaccatctgcacggagccgagggtgtggaacaggcgcgacacattggcggcttcatcgttctgctgcgggtaatgcgcgttggtgtaggccacacgaacgaagcgcgacggggaactcacgtcgcccgggatgccatgcatgcccacacccgcaccccaggcggtcaaggaggccttgccccatgaagtcggttcggccatctcgttgctgacgcacatgtagttgcgcaggttttccatatggaagtcgaacgtcggctgattggtcagcacatcgacgtcatcatgatgcacgtgcatgccatcggccatctgctcgacgacgatgctgcgcttgccgtcgccgatgaaccagtgcagcagagactcctgctgtcccggcacgatctgggagacgagcgtcacgttcctgagcgcctcctcgacctcgtcgacggagtcgaaattacgcgccacccacagcggaaattcgaacgtggcgacgttttccgtgccttcgaccggttcgtggacgaacgaggcgtagccggggaaattcaagccggcgatggccagaccatgttcattggcgcagtcgaaatacatcggcctatcggccatgaccacacccacgccgatcaccgcgttcggcttcgccttgccgcccgcaccaaacaccgtgtcatagtggtagccgcgcggagtaaccaggatggtctccccatatgagaaactccagtcgagattacggccgaaataggtgttgccctcatcatcggagaaacggacaccagtgcacataacggactcccttccatcgctttggttggcttgcacgttcatgatacccatcggccgctgggagaactctgggtttcgccagcagattaacgtgcggcgcgacgcattgagatgcgccgcgccgcgatatgcgtcaaccttgcgtaccgcggaacaacggttccgcattgcgccagatacggcgcgtggtggcggggtggttcatcgaatacaggtggacgccgtccacgtcgtgggccacgaggtcggcgatctgctcggaagcgtagaggatgccggcggcacgcagggactggatgtcgtccccccacttgttcagcagggtgttgagcctgtccgggatgcgcgaggcgttgcgctcggccatgcgacgcacggacttggctccacgcaccggcatgatgcccgcctcgatcggcacggtgatgccggcggcgcgcgccttgtcgaggaagcggtagaagtcctcattgtcgtagaagagctgggaaatcaggtgagtgacgccggcatcaaccttgattttgaggttttcgatgtcctggtccagcgagtcagcctgatagtggccttccgggtagcaagcaccaaacaccttgaagtccggcttcacggagcggatgtatgacacgaggtcgctggcgtggttgaactcgccgaccagctgctcgccgtcgatgtagtcgccgcgcagcgcgagcacggcgctcacgccggcttcctcgaacatgtcgagagcctcatcgatcttggccttgtcggagtagagcgcggtcaggtgggcgactgcagggatgccgtattccttgctgatcgtgtgggcgatgcgcgcggtggcggtgcggtcggaatgggtgccgtgaccgtaggtcacggagatgaagtcggggttcagcccttcgagtccgtcgagggtgtcgtagatggtgccgacaggcgcgttgcgcttcgggggaaagacctcaagggtgaacatcggggaatgcatgctgatttccttacataaacccgagctccctcatccagagggagctcggtgatttccgctacttgtcgagcttggcgcgcacggccttggcggcggcgaccaggttctccaggctcggccaggtctcggcgttaccacgggtcttcagaccgcagtcagggttgatccacaccttcttgacgtccatcttgtcaaggatctcgtagatacgatcctcgatctccttctcggaaggaatacgcggggagtgaatgtcgtagacgcccgggccggcctcggtctcgaagtgcgcgtcatgaatggcgtcgagcaccaccagatcgccacgggaggcttcgaaggagatcacgtcggcatccatcgcgtcgatgtcgcggatgatgtcgttgaactcggagtagcacatgtgggtgtggatctgggtggtcggcttgacggcggagtgcaccagacggaaggccggaacggcccagtcgaggtacttgacgtgccagtcggacttgcgcagcggcagcttctcacgcagggcggcctcatcgatctggatgaccttgataccggcggcctcgagatcgagcacttcgtcgcggatggcgagggcgagctgcttggtctgctcctcgtgggtgatgtcctcgcgcggccaggaccagttgaggatggtcaccgggccggtgagcatgcccttcatcacatggtcggtcttggactgggcgtacgcggaccattccacggtaatcgggttggcgcgggaaacgtcgccccagacgatcgggggcttgacgcaacgggtgccgtaggactggacccaagcgttcttggtgaacaggaagccgttgaggttctggccgaaatattcgaccatgtcgttacgctcgaactcgccgtggaccagcacgtcgaggccgatctcctcctgcttcttgatgacggcgtcgatctgggctttgatgaactcgtcgtaggcttccttggtgacctcgcccttgcgcagcttggcacgctcggcgcgaatctccttggtctgggggaaggagccgatggtggtggtcggcagcagcggcaggccgagggcctcgcgctgcagggcctgacgctcctcgcgggcaggctgacgcacgtagtcggcgtcggacagcttgccgatgcgctcggcgacggccgggtcggcggccacgcgggtgccgtcgaacagagcctggttggcggcgagggcggcggatgccttcttctcgtcctcggtggcgtcggccagggcggcgacttccttgagctcgtcgagcttctggacggcgaacgcgaagtgcttgaggtcttcggccgggatgccggtctcgccttcggtgctgaacggcacgtgcagcagggaggatgcggtggagacggccacgttggcggtgacctgcttcagggcgtcgaccaggccgagggaggtggcgtagttgttgcgccagatgttgcggccgttgatcacgccggcgaagatggtggtgttggaggccacgccatacttggcgacggcttcgaggttctcctcgcgaccttcgttgaggtccaggccgatgccgtcgaagccgagcaggttgacggtctcgtacacgtcggcgatgtggccgaagtaggtgttgagcagcaccttgacattgcccttggcggacaggatcttggtgtacagggtcttgaagagttcaacgtcgcccggctccttgtcgagcacgaggtacggctcgtcgagctggacccatgcggcgccgagctcgttgaacttggcgagcacttcgacgtagacggcggccacggcgttgaccaggcccttgtcgagctcgagttcggtggcttccggggtacgggcgagcttcaggaacgtgtacgggccgatgaacacgggcttggtgtcgatgcccagcgccttggcctcgttgaactcgtcgaacggcttggtggagttgagcttgatctccgcggccgactcgacttcgggcaccagatagtggtagttggtggtgaaccacttcttcatcggcagggcggtcacgtcgcccttgtcgccctggtagccgcgggccatggcgaagagcgtgtcctcctggttgtcgaaggagagacgtgcgtaacgctgcggaatcacgttgagaaggatggcggtgtccagcatctgatcgtagtagctgaagtcgttgctgggaatgaggtcgatgccggcggcctgctgcagcttccagtgcttggcgcgcagttcggcggcggtggccttgacggcggcgaggtcgttggcacccttccagtagccttcgatgatcttcttcagttcgcggttctgcccgatgcgggggaagccggagacggaagtcagagtggacatgaatcctccaatgtatgcgttcgtaacccgacttagggtagcaaaacgcccggattcacagcttataaatgatcgtagagtgtcgttatagatggaacttatagcatcatgtactggcctcgcgtcatcgcgtaaagccgagactacacctcatgccggaaaacacgaacggtccgccagattgctggcggacttgcctcatcatcaccggtggcaccgaaccatggaaaccagccgacgcgatggaatcagtcgaagtccttcgcattgatgacggcgagcagttcgccactgtgcacctgccattcatcgaacggcttatctgagcccataatcacgatggaggccggcgaaagacccagattcagcagatcaagacgttccgaatcggagtcggcagaggcgagccattgcgcgctgatggacacggtaggctcatggccgacgatcatgaacacatgggtcttgtccttgacgtgggcgagttcgtcgaacacggcctgcactcccccgtcatacaggctgatgcgataatcgacgatcggcttgtcaccgaacgtcttgagcatgcgatccagcgtctgccgggtgcgggtggcggacgagcaggaaatccggtcgggcaccaatcccagcgcttcgacacccttgcccacggctttggcctgtttgaggcctttctcggtgagctcacgctcgacatcgcccttgcctccgaacggctcagccttggcatgcctcatgatgatgaggacatggtcatattccttggctgccttggcgaccttgttcagcttgatgcccatccgtggctcccttcacgaaccgctgctcggccctgtatcgcttccagtatagggccgtcgaaacggccggcgacccatcattcggcgcttattcgtcggtgtcggcgagctggccgacctggcggtcgagatcgcgcagcaccttacgtagtttgcgatcggagatatcacgcagttccagctcttcgatctgggcttcgcgctgctcttcggtgagggagtcgatgtcagtggacgtgtccttggtcacgcggtcgcgtttgcgcagtgcctcgaagccgggggccatggcgcgcgaaacgacaaggaaaccagtgtgtccgatcatctgatggtcggggcgtacagcgaggccttgggccttccatgtgcgttcgagggtttcctggatctgcggttcggtccagcagccggccgtgcgcagggcttcggccagtcggctcatctgcgtggtggtggttacgtagctgaccaacacgccgccgggggcgatcacgcgataggcctgttcgagcctgttccacggatcgagcatgtcgagcatgatacggtcgaaccaatgttcgggcagttcggcggccacggaatcgaagtcgccggttttgaggtcccaccattgcggctgctcgccgtagtacagcgtggcattggcctgggccaccttggcgaattcggggcgcagctcgatggtggtcaggtggccatcctgtcctacggcgtccagcaggttgacgctcatcgcccccgagccggcgccggattccagcacgcgcatgccggagcgaatgtcgccaagctggatgacctgggcgatgtctttcggatacatgatctgcgcgccacgcggcatggagagcacgtagtcggccagacgtgggcgcatcaccgcatactcccagccgccgatggcgcgcgaggacttccacggcttgttcctgtccttttcggggtagacctgattgacctgcgcctctcgtttggcgtgtacggtgaggatgaccgcgccttcgatcctgccgatcacatcatcgtgcagaatcaagccatgctcggtttgtgtggagccgccggcaaccagctgatcggtgatcttcttgcccttgcggtcggtgaactgcaccttctcgcctgcggtcagcgccccgcgcctcggccccatgattgctccttgcgtgttcttggtcggtcaaacgatacaagtctaatgcatgtaagaatgcatgtaagctcgttgagtgaggtgatgacgatgcgactgcagatgacgagccgaatcaatgccggcggcgacgacccggttttcttgatgtttcacgggtatggcaacgatgagagcgaaatggtgcggattctcgacgctgtatatgcgccggcacggttccatacggatttatcagtttcgtccgctcccgttggttcctctgatttcgctgattccgactactcagtcaatcacgctgaatccgcacatggtgagaccgggccgagttacatctcattccgcgccacctatccaaggccttacatgggcggcaattactggtatccggacggctgcggcgtggaggaacggcaacgggaatgcgcggcggtcggcgaagcggtgacctcgttgctggacgcctcagcgtttgcaaaccgtaagaagattcttatcgggttctcccaaggcggctacctgtcgtaccgtctggtcaaggcgtatccgaccgtgttcgattcggcgattctgctcagcccttcgttcatgggcgaggagcaggcggcgcttgactcccttacccgattctttctggcctatggcgcgtatgaccgcacaatccccgcgcccgaccagcagacggcccatcaggtccttgaacgggccgggcttctgacctatcgcgagtatcccgacatggctcacgccatttgcgacgaggaaattgctgatattcgtgattttctgcgcgcaatatgatgtcggcatagcccgatattggatatctccgttcaaaggggtgcatttggcctcttgcggaatgccatctccgttcaaaggggtaccgagccaagtggaagcagctcagagacggcggaatggcgttggtgtctgaccgattatactcatggtttcgcgaacaaagtacctcttcgaaggcagttaccattctgcaaagcgccgaatgtacctctctgaaccgagttaccggcgttttaatttgcaacacacgtttcgaggggctgatctgaaccgttccggaggtctacttccgtttcaaggggctggtcatcctccggacgaagcataataacatcctcatgcccacgtcattccgccgtttttgccctccatctacttgggcatcagccccttgaaacggagatagacctccggaaagcacgcaatcagccccttgaagctggagtagcccattggctgcacccatctcgagcccatccatctcgaaacagtcccgcaacagggtcaattcccctgccgactgatgccgtccttatgtccggtggctttgaatggtgtgacgcgagatacggtattcgccgctgcctgtcgggacttgcccttagccgcaacgattttggattcgaggaatttccctgtttccgtcttatcgctggagccgtgttgactgccctctccgacattgatgcctttggcacgcagggcacgcgcccaccgctcatccatcgtgttcctcacacatcccattccggcttccatgtgtactgcatgtcgtaggcactcgaccagaacatgtattcgttctgcacgccggtcacgaagacctccacgagttcgtccttgcgttctgcgctcaggtgttcggtcagctgctcgatatgttcgatcagccatgcggagctgctccagaactcctcggttttgtacatgtccacccagctcttgtacgggttggaatcaagcgtgtccgtgaattcggcggcgagacgctgcccgtagtcggcgtacacccatgcgcagggcagcacggccacgagaacatcgactaaaggattgccatatgcgatcgaaaggatgttcgacgtgtaggcgcgggcgaacgcggactgacgaaccgagttcatttcctgctcgctgatgccgtagcttgccatgtatttgcggtgcatcgcggactccacattgaagataccgttctgcacgtcggccatgaaccgcatgacttcgggatcctgggttttggtgagggccagagcgtggaccttggcgtagtcgtttaggtaacggtagtcctgcagcagatagaatgcgaagcgctcgcgatcgagcgtcccgttgcccagctcgcgcaggaacggctgccggtatccctcctcccagaccaagttggcggcctcgcgcagtcgttgcgcgaacggcggcagatggtccaaggtgatcgggccgaacgcggcggcgtcaaaagtcatcatttgctccttccgatggtgttggccaacaggctccaagggtcaggccttatgcctttctcaacccgcatgtcggcgattgattcggtctcggcgcgaatggcaccgtaccggctcggctggtatcggcttggttcacgggttcccctgcaatgcgccttattatggcaacacgaacagacacgggctgatggccatccttgcgactcctcacatggcgcttatgggcttaggatggagtcattcgtaatgtccttgcaccggttgcggcaaggacagcaccgcaggaggaccgtcaatgaagtatttcaccaccgatacgcatttcgggcatccgctggtcaccgtgttacgaggttttacgacattcgatccaacgcgctcaagctatgaggaaatactgcgcgcgcatgggcgcaaagccgctgaggattgggccaaggagacgacgctggactcggggccgacgttccgcacggcagccgatacggatgctcacgacaaagcgatcgtggacaatatcaatgcgatggtcgggccggacgatgagttgtggattctgggcgacatcggttttcgcacgtcactgacgcatttgaagaactgtctacgcgcgctcaattgcaagcatttgcatggtgtgatcggcaatcacgatgattggtggcttaaagatcggcccgcactcaacctgttcgagagccttgagccgaacgatacggtcgaaatcgaaggacttggcatagtgaatctgtcccacttcccatatcgggaggatttgtcgtacagctggcccgacgatgcggcaaagttcagcggtaaggccctgccgtttgacggtcgcaagctgctgtatggtcacacgcatcagctttcgcccgatggggcccgtccggaggctctgaacgtcggattggatgcatgggacttgatgccggtgagcgaggcgcaggttatcgattggttccgcgaacatgacgatggcagcgcatcggctagcccgacaggtcaagcaccgtcgcttgatatgccgtcgttctaaaggataaagggatagcagtcatgccactgcgaattgtgcatcaggacatcaccaccatgcaggtggatgcgattgttaacgcggcgaacacgcggttgttgatgggcggcggcgtgtgcggcgcgattttccgtgcggcgggagcttgggatatgcaggaggcctgtgaccgactttcccctattctcaccggttgcgcggtagcgacaccaggcttcgcattgtccgcccgatacgtgattcacaccgccggcccgatttggcagggcggtgatgccggtgaggaacaactgctgcgcgcctgttatcgcaattcgatggagcttgctgtgtcgctcggctgcagaagcatcgcattcccgctgatttccgccgggatttacggctatccgcgggatgcagcgctcgcggtagctagggatgagatacacgcgtttctcgccaccaacaatcgcaatcattcaggcggacagtccgagcagggcgtaggagactccgattgttccgtatttctggcgttgtatcggtagtcgcgcgatcatcagcgatcggcctcgtatcatctgtatgatgtcctgtattgcaacagaaccagggggattccatgcagaccatcgactcatccaaagccgccgaaaacgtcactggttcggacggtgccatccatattccatctaatcccacgcttgccgggctggcctcgctgacccgcaacgtggcgtacaagaccggggccgatgatctggtaatggatatcatcgccccgcaatccaccggcgatgacgataaccgccgctaccccaccgtgatattcgtgcaaggcagcgcctggaccacgccgcatcgcgactacgagatcccgcaactctcggctttggcccgcgaaggctttgtggtggctacggtgaatcatcgcgatgcctcgagcgatccccacgacgtgttccccgcatatctcgaggacgtaaaagcagccatccgctatctcagggcaaacgcacgtcaatggcacgtggaccccgaccgtctcggtatctggggcacgtcgtccggcggcaacacgtcgctgctggtggggttgaccgccgacgatccacggtatgaggacggcaccaatgccgatgagagcgatacggtgaagtacgtggtcagctgcttcccgcccaccgacatgcttgaagctgtcgacgcattcgacgatgagaccaatccattccggctgtactatttcggcccgttcgcggccgtggtgggtgcgacccatgagaccggcatcaatgccgaggtccgtcagcgcgcggctgacatgagtccctacctgcaggtgcgggacggccggcagtatccaccgatgctcctgttgcacggcaccgccgacaccgtggtcccctaccatcagtccgtcaagatgcgcgaccgactggtcgagcacgacgtggacgcacaactggtcctggtcgacggcgccgaacatgagtacgatttctggagccagcaggtcttcgacgtgattttcgatttcattcgtgagcggagctgaacggtaaaggcacacgggcgcgtccttgttataggttgccgagttctcttttagccaattttgttggagcccctgtctgcgtgaacatgccatgacagttctagactgtgttctaagactgtcaatcggcaatgtgtatgaaagcgtgatgtgatgggtcagacggcgattgatggagttgagggacttaatagggccggcgaaatcggcggattcagcggttcgcggtcggtggcgttgccgcctataccattctggccgtgcttacttcgcgactgttgcaacggccgactaccacggaactgttgctcatcgtcatgtggatcacgctggaactatgtgcgctgactatgttgcacagttccggagctctcggggcaaccgccgccatcgttttggccatcatcctgctgattttgcttatcgccgacatggcctgctacctcgcctactgccatctgccacccatgcccgccttcatcgacggcaccgcaccactgattgccgtaacggtgttttctgagattgtcgtggcgatgattgtgtaggtccggggattttgtttgctatttcgtgttattcaattgtgtcccgaatatatatgggcactgccaaatttatgattccaatcttttcctgcggatcggcttaagataattgactctgaaggatttccaatcaccaaaaaacttgttgtccgtttcagtttgttccccattccggaatttctcacaggtcaattcaagggtgcatagaaaatccgcaacttgttcaagccggtagtcgcgtggagaagcgtcacgatagacaatggcatctatggagagtgcatactcaatcccgcctcgcagggcatcagtaactatctgttggccaccgtcgtaatacaccttgacagtgccataagaatggaaatccgaaagatgcgccaaaagtagattaacaatatcgcgtttgagttgcgcttcaaaacgttggcggttatcgtcaaaatcacttttacgatgcacaaacgtccgatatgtaatcggcagccgccgagtcatgataacgaataaacccagaagcctcttacgctccgataggctcatcccttcgtaagcatcatgcccggtaagcagcggcccagcatggaaagggacatcaggaagtccatagtcagccaacgactggcggtaccgctctaaggcaagactaatatccttagactggtcatgaaaaacaagagtaattaaataatattctgatcgtttaccccactcaccgctctcatcagcgaagatgctcaatacagacggcatcgcaccccccgtccccgttgacaaaaaatgccgggggagccccccggcgacttggagcctttctcgtttccgagtaaagcaatatatttatagcattttcagcccctagcccgcaagccacaaacggctattccgctgacagctgctcatattgtagccacgccatctactgcaacatcatgtcacggtgcttgtgccaacggaacagacgctcacgatggcggttcagcgtgaaacgatcccacatctggtcctcggcccactcaaccatgccatcatgttcttcatcttcgggattgcccaaggtatcaaggaaccgctcgaacccatacaccccgccgacatcctccggaggcgcatcccccgccccatcccaaagctgaggatccgcaacgtgcacgctgcggtaggtacgcagcagcttaatatcatggatccaatcgtcaccataatcgtagtaatagcgagcggtacgcgccttgggaaacacgtcgcccagctcggtttccgaagcaatgcgaacttccggcaacggctccaccggcatatattgttcgtatttcgcctcatggtatgagggctcttctccccacaattcttccacttgcacctgcttcccattcggaaatgcggcgcagaagcagaacagatgctcgccgtaccacataaagcattcctgcaataccgcatgcaaatcgaagaacgtcaatgatgccggcaccagaatctcccgccagcattcacgcccgtcaaggcgcaaagtgactcggaaacgaaatgccgtgttgccattgcctgccatgaagactcccttatcaacgatgaagttattatcaccgtaacagagtctggggcaaaccactgcgttacgtatctgattcgcgccctcagaaaaggccgaatcatctgttcaatctccgtgtcctgtggaaaagactctaacaataactggtactgttcatcatcagcaagtccaatatgccatgtgaccaggtgcgggacactcatgtgatcagtcgctatggtggtgagacgtgacttcggttcgtaccgtcgagcagacgcgaatgggatagccgcaccgctcgtgtccaatatcggctggggcgtgctgccgctgtactggcgcgcactgtccagtatgaatgccatcagcgtgctcgcgtatcgtttggtcgccacgttggcggccatggtcgcgctgttagtggcgttctccgtcctggccaccgcgattccgctggccatgttctcctacggcgtgcagcacagccattacctgaccgtgagtttcatccaatatctcaacccgctgatccagttctgtgtggctgtgctcctgctgcacgaaccgatgcgcgcgcagggctatgcggcgttcatggtgatttgggtcgcgatcgcggtgtattcgttcggcgcgattcgggcgtattgggagcggctgaagccccacgcacgttaagcgcttccttaactcccctccccgaggggagctgtcgccgtaggcgactgaggggaggtcgacacggcaaacagcagaaacctcgctcccgaccaaagccacaaacaccactcacgaagcaagcttgtacaagttctccttaaattcccgctcactccacttaatgggatacgcattgtacttttccaaagcggttattagctgattgtcaatgcgccgatccgaatcattgaggaaaacaaccagttcacttggtgtctttcgtgccgtctgcgtatcctcccatgaaaataaggtactggaaatgagtcgctgggaaggccgcgtaatagatgtgcagaatcgttccgtctgtttactcgtgaacggcaacacaaagtcataccggcacagcaaaccagacttgccacggaactgagcgccttccacataccgtatgttgtttatatgaattctgataattgttctaaaacaaattgtaaataatctttacttgaagccatttccaaccctccaatcttgaattttattattccaatgctttctttaagtccagaacaaattgcttttgttgttttttcaaataggtttttacaaaaggtttcataaaccactttttaggtatcacattttctgtaaagtctatttgtgtttcattccctttgtctataaaaacaccaatccaatgacctttcatgttgctattctccatatcaaattcccagcgtttatatggttctacaacggtaacggtaaatgtagtagcatatccattttttgtgtattcaataaattgtttgtcatttattatttctgttttgctcaaatcacttcgccatgagttatatttatcaacagctaaaacaatgttccaaactttttgaaaatcattactaataattgtatttatatttgaaattgccactttttcatttccccttttcaaattaccgtttatcgttttttcatatccacattataacattctcatatcagcactacaataaaattttatgctccgataatcttattgaacagcgctaacagacaccatgtcatcactccaatctgaaattttggcaagaaaaaagcagtcaatcataagactaactgctttgtgtagatatgaacttataaaatatttagtttatgatattgcaacatcatttaatgtcctctgtgttttgcttttttcttttgttgcttcaacttaaacttttgttctgcgtccatttgctttttatgtttggaattagatttatattcttctttttttaattcatgttgtaattttaaagcttgttgcgattttgtcccaattccattgttctgtaattgtttctttacatctctaagaactcttttaggatttttcttatccttttttacaatcgtttcaactgctggactaaattgtaaatcataataatgttttattaaatcagctaatacatccttagtacttggcgaataattgttttcaagccacattcttgtttatgcgatgattcgatggattattggggagggggctaattgcacaagatgattcgtgcgtaacttatggacaagtcgcgtgagacgaggccgatatcaggaagacttcagtaccgttccgcacgtcaacaggataaaaggtacaactcagcaccatgaagtaggtagcccgtcggccggttctggatgcaccctaatgtcgcagcgtagctctcggacttttctatacagtgctcgtcatagtttttcacgatggtaaacaacctcatcgtcggaatcataatcgtcggaggcacgccgttccgataatccccattgagtgaggtccaagtaggttgtaccttttacctcacgcattgcccgtatgactgactccaattcacgaggcgtccaacgactccctaatctgacccgctgcagttcgggaatactagcgtctatatggacgtcagaagaagtctttgggtgaatagtcagtacacggtttcgccataaaaacataatccattcccggaacgtcctgtacggccaaggaagctcgtcattctcagcttcaggaaaagaatagctaatgtactgcatgtacatgaaacgtttatcggaactatccaagtacaaggccagcgcccaagctttttcgtcttttcgcgtcattacagggatcacgagggattcgctcggagcaaggagcatattcatctcaagctcattgggcatcaggtcgtcaattatatccatgccgtgcaacaagagatgccgaatccgaataggagcagcaccggcattcatcaaacgaagccaatcatattcaatttgatttaggactttgctatccttcgttgttgaacgaataaagtcgtgcctgaccgccgccaactccagtcgtccatgggaccagtgtcgcgactgatctaaaaaggatttagcttccatgcctgctatgacgagaccaactgtgccgccaatgtttgcaagtaactgaagatagtccgtcatgcgggcaatactaacagcaatcgtagaaggtggataacggttgaccttgttctacggctgtagacgagctcccccaatccagctatgtcgtacgttgtgaaacgaccagagcagtcgtgtttgatttggatgcgtcgccgcttgacttggcgatgctctctagacatccgcgtgggataagtcgagatattgagtagccgggcagcaccgccagcggccagatgtcaaaacacgccttggagcagtcagcaaatatgagtaggctcagaactgattgacgtggcggctaaaagattgcaagttggtgtctagatcgagttcctattccgttctggagcgaattgtattcacctctattgtgtactactgtattacacatactgtagtacacaatagaggtgatcatatggcgactgtatcaatccgtatgccggacgacatgaaggaagcgctcgaacgcctagctacagagaaatccatgaccgtcagcgggctgatcagcgagcggattaacgacatgctggggcaccgtgaagagatcagggaggataccccatatacactaaccacggcggaacggtacctgttgatgcgggtggaagagctgagtgcactcgttaagccggaagacaaagcctacatcgagcgtgacgtcgaggccttccaagaaggatatacagcggaatactctcgcattttcagcaaaatgcacatcgaactttctcgccaagactgtgagttcgtctgggacgtgctcgacatgttccgcgacctcatcatcagctatgacaaccttgaagcctcagataaggaaaccatcgaggaatcccagtgccactaccagggcttcgaccataacgacaatcgtgaatgcgctatggagagatacgtgaaatacctcgccaaagacgattgctgggagtttacagtagaagactctaagaagttcagcgatcgcggtaattcccactgccagatggttcccatgtatcagggtatgcttagtgcccttaacgaggtcaaacgtcgccgtcgcatggcgaatcgctcgtactccagcaattgccagccgttcgacaagaaagaaatccagttcatacttagtgcccgtcgttacgactcgccattccgtaggggctaaagatcaagctaaggagtgagatatatgtcatccgtgttcaaacccaataatgctgcgttacgcaaaatggaacgggaactgcagcgcagtttcaataaattcaatatcactgttccggttcggattgagcaaccggaaattccgcatgactgggttgcagatacctctcttgcggccaatagcactatcatcaacgccggcgacaattcgcagataactgtaaatagtcaaaacgtacagcagtctcaaacaatcgttagtgagccagacagttttggcgacctgagaatggtcatgcaggaaatcctctgcaaactcagcgatttggaactgacggatgaagacagccaagaactcaaagagtccgcagaggaagtgattgctgaacttgattccgacacccctgatacgggaaaaattcgcggcttcgctcgtctgataaagcgtatattgacaccaattgcaacggctgcgattgctggcgcggcgaccggtacaggggcacttgtccaacagtggatcgaaacgttgactcaagcctgttaggaatattttcatggattctcaacaagcgatgacgctttgccttgaccgtgaggtcacttcaatcaggcactccgtcacgactgggctcatgctgctccgaaaagcaaagcatattgatgactcgtttgagccatgcctcatattcttgccctacctgactggcaagaataaacaacatgggaggcgtcaccgttgagtagcgcattgaccattttcatcgcgtatgctcctggaacgctgagccttgtctgcgacctcttcgacccctatagcgggattttcggagctttattcaagtttgttgttctcttcattactggcacgtcgctcatcaacgtgtatgcgcgcaaggacacgttggctaacacctcggaacacaactactacagctaccctcgaatcccacggcatcatgaaggaacagaccggccgcgcagcatcactcgccgtatacaaatccatgctgggactcgtacgtctctgctcggccctcaccgtagcctgctcaatcggactgaacggcacgctcaccctcatggtggtgatatatccgacagatatttccctgtcacccgctaacttccccggcaacaaagtggtgggcatattcctactcatcgtcggcctggccacgtccatcgcctcggccatctacttctggaaggccgcctcccaactcagccgaagcgtaacggcccaacactaggaatgttcgctcactgcgagcgccttatgccaacagttccgtcccaagcacatcatcgataagcccacgtccgcgcatatctgtggtgttgactcgtcattcattgacaatcagcgaatccaaaagcgttttctcgaccaattcgaagaaacgcttcgatgaggtgcagcccagcgaagcacattctcgactcgcccacagattcgcctcgcccagctctgctcagcaggagctaaacctcaatcagcccgaagaaatgacccgctcagaactcaccagcgaatcaaaacctcttcctaatcgatggtttgctccgctcaggactacttcaacagggcaaaacctcgacggactagagggaatgttccgcctagatctgttcagcgaagcgaaacctcgacaaacctgagggaacaccccgctgaatcatcaccagtggcgcaacccagagagccagtagaggaaaagccccgctaagcggcctctcagcaaagcaataccttggcccatccgaagatttgccccactgagactgctcagcgaagcaaaagctcaactcaaccgtaggaacacttcactgaccgcccatcagtgagccaaaatctccattcaccagaggatttgcctcgctaatcatgcaaaagtgctttttaaaatcgctgggaggttattcatttcctcggttattcctccaatcatctaagtcaaaagaactcagcacacgcacgccaatattctctctcggcgttccacgaaccattccctcatattcgggactacagtaaacggcagatgtagccgattgtgcccagtccgaaggaggacattatgggattatttgattcgctgaagaacatgttcgcgcatcacgaacaccatcatggaggtggcatcgggcaaccgctcactctcgccgataccaaagcagtgttggcctttatcgtggtgcatcagcagcttgctgacatgcgcaaggtggccgaagcggtcaagcaattgcaggatgagatgcctcagtacatcacattcggcatgtcgcattattacagtgagcccaagcgcgtgcgcttccagtccgaaggtggcaagttcatcgatgcggacgccatcgccaccgcatttgccgagaccaccgtattgcaggacgagtgcgaaatccagcatcttatgggcgatatcgaagacaaccgtgagcatcgcgatccggcaaagacgccagcagtaccgattgacgaactcgtgcgcgtcatcgatgaaaggcttgcgaccggcaacgatgaggagcaaagtcgtgcatggctgttcgccttattcgatcagctcgatgacattgccgaggcgacaaagaacaacctggagccgcttgtcacagcgttggatacgactctacaaaacagctccgctactattggcaactccgccactaccgacgctggcaacagcagcaacaatgccaatgccggcgatgcacgttcccgtatcatctccctaatcgccgacgccctcttcccggccgcagaatcctcgaagacaagcgagtcctcagcatccgccgccatccgcgaactgatgctcaatcccaccgcaacatcgctcgattacatgccagccatagacgtactgcgcgcccacggtctcactatttgccggtgagtccgagaagtcaaccggtggttcatacggcagtggttcatacggcacatgccgcacggaactgctatgcacgaaccactgtgtccgaacaacgagaacgcactacttctccagcttctccaactttttccagtgcctttaatagcgaatcgacatgtcctttggcacgcacgttgtagcgcgcaatcgccacggagccatcgggattgatgacgagcgtcgagcggatcacacctacgtgcaccttgccgtagagcttcttttcgccgtatgcgccgtacagcttgtgcacggtcaggtcgggatcagacagcagcgggaacgtgagatgatcacgctcggcaaacttgcgcagcttatcgagcgaatccttggacacacctagcaccacaacattctgcgattccagccgagcaagattatctcgaaaatcacaagcctcagtggtgcatccgggcgtcatcgcggccgggtagaagtacagtacaaccctgcggccggcatcgagcacgtcagacaggttgattgatccgctctctgtaaacccaggtataaccgccggcagagtgaaatcgggcgccgcgctcccctcttgcagacgttccggcattgaatcagagctatcaacagtagtggtcatgattcccatcatagaacccttatcaacagcgctagtaaagttattcagaggtcagtcacacaactgcggatcggcaaaacggcgattctgcaacaccggcaatgttcgatgcgcggaatcaagacactcacgactcagctcagcagtaatgagatcggcttccctatcgcccaccgcagcatcacgcgcgaatccgtcgatgatctccagattccgttccggctcctccgccaccgtaaattgcgcaaccgcgacggacagatgaccactatcttcgcatgatgaacaaaccattttgaattcataattctctatgctcggcgcagcatacgttgtgccgcatcgcaaagtttcatgaatccaatcggatgaagcaccgtagtatgggaaggcacatctttgaatgaatccgcgaactgcttatttcgtgtgacaaggatcgtttgcacgatgcccggagtattcctgatttcatggcatgtgcgaataccactccatctttatgatccaagggtggcacgtgttcttctccgataaatccggtcaacataatatcaacaagattgtcatggaattgatcgaggaatgatttcgccgaggattccgaccatttcagcaatctgcttagctcatgctgtaccgtgtctttgatgtgcagcgagctgccaagctttaaatcatacggaccaaattttcctgctagcacgcattgaaaatgcatcgatttcggcttgtaaaggcctacttgcagttctgaaattacgcaaattagctagcgacgcgtcaaaacctagggcttctgccacatcgatataaatattgcagtcgaaaatgacacatacggcggagctcatcagctctccagaagttgcttcaaataagctgaaccatgcacccgcactggtcgagtatcctcatcaaagcctccattggtgtctacctgctgcttgatgaaatcaaaaacctgctgaggagtgacacgaatgctgacttccatctgttctttcattatcgtcggcataagatcgttccctccttccccgttcagtatatattcaacttatttctcactactacagcacgaaaggatccttcgtctgagagcaaacgacatagcctcacaccagtcccaacatcttgaaggcgttggccaggccgtcctcgtgaatgtcggtggtggtgaagtcacagaaggcttggatgccgtggatggcgttgcccatggctacggatatgccggcggccttgagcatggcggtgtcgttgtcggagtcgccgatggcgatggtgtcggcaacggagtagcccagcaaagaagccacgtcgcgtacggcagtgcctttgtcgatgccgttgatgagtagttcgccgttattcggcgagattttgtcgtatgagccgtgaacgagctcgaaccaaggagcgagatcacgctgggtttcctcgaaggtcacgtccggattcggggcggtgaagtatgagcctttgctcacgtgaatcgtgtgccccagcgtggagccggccggcacgtcaatctcatccaacaggtgccagaatcgcgcgaattcgccacgattccaggtcttgcctttcgattccagatgttgacggtagccttccgagatgtacatgccatccgcaccttgccattggtagctctcgatatgatgcttggcaaaatacgccatcgccgcatcgaccgcttcaggaggggcgagatgctggaacagcagcctgtctccgacattcgcctgagcacccgccacggaaaccacgccatcgaaaccgaggtcgaggatgctgcgttcgattttcggcacggaacgcccggtgcagatgaagagcttgtggccgttggcctgggcttgtttgcaagcgattctggcagattcgggtacgacgtggttttcgtcggctagggtgccgtcgatatcgatgaatacgagtttgctgttggtcatgttgctttccatattccccaattttctccccctcccagtcagcttcgccgacagcccccctcatcagagggggctaataaagggacccagccagcttacgctgacaaccccctccagaggctaagggaaaaggtcgccgaaaagagtccaatgacggccgtcacacggcgtaggcggcccagcgaccgtgggtgtgctggacttcgatgggcataccgaagagattggagagacgctcgtcggtcagaccgtcttccagtgaaccggtatagacgatggtgcccgcaccgggattgcccattacatcgaggcccgcttcagtggcatcctcggcgggaatcggcttgcgacccataatggcgatgtgatcgaagcctgccggaatctcctccaggcggtgagtaaccaagaccacggcgcgatcagaactttcctcgccgatacggctcagtgtgcgcatcacctgctcgcggccgcccaggtcaaggccggtggtcggctcatccatgatgagcagctcgggatctcccatcagcgcacgggcgatcaatacgcgggtgcgttcgccttcggacagtcgccacatctccttgccttccagataggagacgcgaaaatcacgcagcagctggcgggcgcgggcatattcctcgtccgtataagtatcacgccagcgcccagtcacggcggacaggccggtgaccacggcgtccagcgggtcctcgaactcagggaactgccggcccaggtcggcagaggcgagaccgatgcgggtgcgcagcttgaatacgtcgtatttgccgagctggtggccgagaatgaacacgcggccttccgaggggaaggtgcgggtggccagcatgccgaccgcggtggatttgccgatgccgttcggaccgaacagcacccaacgctcccccgcgttgatggtgaggttcacgtcggtgataatgacacgacggttacgccggaattcgacgttgtcgagttggaggacggtgtttgtcatgagtgaaatgctaactatgattcgcgatctgaggactcccctcagtcacctacggtgacagctcccctcaaagaaggggagccaagagacaatattctggctcccctccctgaggggagctggccggcgcagccggactgaggggggcactcgttgcagcgctacttacttcttctgctcgtcgagcacggactggtagacttccacggtcttgtcggcgatggtctcccagctgaacacgtcgcgggcgcgttcgtagccggcctgtcccatcttcttggcgagttcggggtcagccatgatcttgtcgatagcggcggccatatcgtgtacaaacttgtccggatcggtgggggtgccggtgccgtcgtgcagctggtcaatcgggaccagatagccggtttcgccgtcgaccacgacttccggaataccgccggtggcggatgcgacgaccggcagaccgcaggccatggcctcaaggttcacgatgccgagcggctcataaatgctcgggcaaatgaaggcatcacagccgtgttccaaagcattcagctcaggcttcggcagcatttcttcaatccagacgatgttgccgcgctcctcatccagcttggcgaacgcggtcttgacctcttcggcgatttccggggtgtcgggcgctcccgcgcacagcaccacctgaatgtccttggaaatcagatgtagggccttgagcaggtatggcagacccttctgacgggtgatgcggcccacaaacagcagggtgggcttcgaacggtcgatgttgtaacgatcgaacaccttccagcccgggtcgtcaggggccggggtggcgaagtcggccatggtgatgccgttgtacaccacgacgaccttgtccgggtcgaggttcgggtaggcggtcagaatgtccttgcgcataccgccggacacggcgatcacacggtcggcgtgctcgtaagcatccttctcagcccaggagctcagattgtagccgccgccgagctgctcacgcttccacgggcggaacggctccagagagtgcgcggtaataaccaatggagtgccgtgcagcatcttggccatgtagcccgccaagcaggcataccaggtgtgcgcgtggatgatgtcggcgtccacatcattggcgatctgcaaatcaacgccgaaggtcttcaatgcggggttggcatcagccagctcagaaggcgtgtcatagccgacgaccttcaagctgcccttagcatcggcagcattcgggatagcaggaatgtccgcctcggtgcgcttgccatcaaacgcacgaacggttacgtcgatgcgctcggcaagcaccttggacagttcctcggcgtgtacaccggccccaccatagacatgcggcgggtattcgcgggttagaatatcaactttcatcggactgcctctccttcgtgcgtcagaaagaaactcaagcacttcttactttagggcaccgcatacaagaaaacgcacaacttccgtcgtgcgttttgcttttcaagccggatttaccaggcaaaagatcagactgccgtgccgttctgatccaaattcggattatgcttggaatcgccagccgtaaagaacaggctcagcacacccacaatgaacaccgcggaaacggtgatgatcagccacatcggatggcttggcagccacataaccacgaagaacgcgataatcgcgatggcgatcagcgtccagctgcccacacggaaccactgacgcagcgaatgcggtgccttgaacatcttcggattcgtgtagttcgggttagtggtcagcagggtttcggtgtccgcaatcgtaccgccgctgggcttccattcggtgccgtcggtgccgtcctgcagacgctgggacttctgctgcagctggtattcgtcaatcattcccgagcgaccgcggccttgggtctggtcgtactgcgacggcactcccctgcggcctgctttggcttgggcacggcgttctgcacgattcggcatttcactactcctgtttcgacggtgacactgttggctatattactcgcttatcggcggcaatttgccaccagtccatcggaacccactgtgtgtcattgtattttcagtcagtgatgcgggcagtcggtgatgcgataggtttgcgtatggaagtcgcaagtgaccgcagtgccgtccgcgaataccgaacgctgcaccagcggatcatcatccacgaactcgtgacgaaccagttcctgcatgccgacccgctcatggaatgcagcgaccgtatggcagcgttcgatgtcgttttccgtgcgagcgcgctgttcgtcgtccatgtcgccgtcaacgccgatgtatgcggcatcgcgaatcaggtatggagctccgccgttgagcaaggcgtacagcatgtaatcgtcgccgtccaccacacgctccatcatccacggctcgataacgcaatcatggtagacgaggttatacagcggcaccggtacaccttggcgcggctcgttgggtgagcgcatctggaagtcgtatggcgcgtaatggcagaatatcaggcttggcactgcccagtccgatacctcttcggacgaggagaggatgccgtgcgagagcagatattcgaagcactcggcgcggcggtcaaagcattcgcggcgggtcatgcggtgttcggggttcgagcattcgtcgccttcgttgcaggtgaagacatccaagtatgcacagtcgagtttgatgccatgcgcggcaatctgggtgaaattgcggcgcacgtagtccggtgcgagctcggcgcacaggtaggtctggcggccgcccgcccagcgtgcgtgttcgggcatcgtaccgtctgccagccgaatcgcattgttggcatcaaaggtttgcgcggtgaagtagtaatcgcggtactggtcatgcgtgccgaaaatatcgccttgctcatggcaggcgtcgaccagcgacttcatgccttcccagccgcctgcctcctgacaggccggcagatagtcggggtgtgcgttgtcgtatccgggctgtgcccaaccatccaagtgcatgtacagtcggcctgcacccatgccgtgcagtgttcgcatttgcttttcgcgctgcgcaaaggtgaccaatgaatcgtttttctcggggtgatccttatcgtagtagtacgagtcgggctgcactttggttttgatgccgatgtgcacccacgagcgaccaatcaggtcacgcacggagggattgcgcgccgccttttcggcgagcgtacgcaggcgacctcgttcgttgacgtacgaacgataggccttgcacaccgccgtgtgatcggcgtggtcgaggaactggtagcgtaccacgcggcgataattcattgtgccgaggcttggctcaaaccaagtattgatatgggtgtacgggccatcgctgggatggtcgatgccgtaaccggcattccatggagtttcgcagatggcgatatacccgtgtccgtctgcgcggagctgcgcgaaccacggcatgtaaccgccagccgtttcgaagcggccgtcgaaggcgatgtctttggtgctcacggcggtaggccatgtgttggggatcatcacaccttgctcatgggtgatgagcgtcgtgtcatgatcgtcggcgcaatcgaagtccatggctgcgggccacgtcacattggtgatgttcaggccttgctcattgagcggaatccattcgaagagcacatcgcctgaggcacgctccacccatacataggtttcaaaggagtatgcgctgtgcccaaagccggtgaagatgctgcgaatgccggttcccgtgccggtttcacgctgctcatgggtgatggaagtggcatccgcgaacgcgaaggtgccttgcgcgcattgcagggtcggcttgaaatcagcgcaggtattccattcggcaccgtcgcgcgtaaaagcgaactgcattgttcgttcatcgaatcgcacggtagtgccggatacggtgaattccatagttaatgtgctcctgtatgttctcgattgctcccgcttacgggagctcgctcatataacaagattaggggtggtctgctgtttgagaccacccccagtcggctttgccgacagcccccgccagcggggggctagcgctgtctgtttattacttactgcttactgcttcttggtcagtgcggtgaacactgggccgccgccgtagtcgaatgcgacgccggagattgcggaggtgctggctgcggtggcattctggttccacaacgggatagccggaaggtcctgcagcagaatctcctcaccttgctgataatacttgtcggcttcctcggtggacggggcggaaagagccttgtccatcatggcatcgaactcggggttcttgtagttgccgctgttgccgcccttgccgtcggccgaactggaatcgtacagctgtaccagatagttgtccgcggatggataatcagggccccaaccgctacggtatgcggaggtcatcttgcctgaatccacattggacaggaactcgtcggaagtggacatcgggatgctcttggcatcgatatccagcgtgttcttgatgtagttgcagattgcctcaacccagttcttcgcagtgccatcagcattgtatgcaatgccgaactcaccgctccacggggagatggcgttggccttggcccacagttccttggccttggacgggttgtacttcagtacttcatttcccttgagttccttggagtaggcgctgattggggctgcaaggaagtcgacggcgggcgtggcggtgccgtggaagatcttctcggcgacggtcttgcggtcgatggacatggaaatggcctgacgacgcaggttgccttcctcgttctggccgaagtgttccagccattcaggaatggtgaaggtgagcgtattgccaccgggctcgttgtatgccttcagcgacttgtcggattggaaggaggtaagtgcggtgtcaggaatcatgttcgtgaagtccaggttgccaccgcgtaggtcggcgtatgccgaatcaggcgaggtatagatcttgaagttcaggccatcgttcttggcgacacgattgcccttgtagtcagggttcttcaccatttcgatgctgtggttgtgctgccaggacacgaacttgtatgggccgttgctcactgggtgctgaccgaacttcttcgggtccttgaacgcggattcgggcaacggcatgtaggcgtggctgccggccttgaccgggaatgccgagtcgggctggctgagcttgacatcgatggtgttgtcgtcaacgacggtcaggccgctcagcgtggccttggggtccacgtccggcttttgcagatcatcatagccttcgattgtgctgaagaagctggcgctggcctgcttgttggcactgttggcggtgtaattccatgcgtttacgaaggagtgcgcggtcaccggagtgccgtcggtgaacttccatccgctcttgagcttgatgacgtaatgcgtggcgttgtcgctggaggtgatgctgtctgctacctcgttgtggatgccgcccttcgcatcgtaggtcaccagacctgcgaacagctggtctacaaccttgccgccaccggcctcagtggtgttgccggggaatagtgggtgtgccggctcactgccgtacacggaaatgatattggaatctgaagcattgctggaattggaggtaccggtcgatccgcagccgctgagcagcatgacgattgccgcaccggccgcgaccagtgaagtgacatgacgtgtgttcatgaatctctcccaaatattctggcgtcgtctttttggcgacgaaagacaccataggagcttcatattaactatatatgcaatattctcgaaatatagacattacaagtatttttggaataattaatcagtttctacatcctcggggacgcggctacggagaatttgcgaggacgttacacgaatggtgacggtactcacaacgacggctaacgacattttcagaaccaagtcactgaaattggctacatccgaacaagtaggaccacctttgtaaggagaaatcgcaaacactgtccattcgtatgagttgcaatgaagcgcaaaaggttcatgcaatgtaatctattaagtatcaacatatttcttgaagacttctccaacgacaacgttgtcgtccacgttcggttcgaactgacgatattcgtgaccacaatcagccgacgctttctccccctgaaagggattatcatgagaaccgccaaaaaaatgttcgcttcgcttatggtggtacttctctctatatctattgctccgcaagccttctccatagaaaaaatggcaacacagagttgcgtgcatgtccagaggtcggacagacctcggtaagcgccactattgttaataacaattaccatatcggcgtaggacaaatcttccgatcaggtccgggcggtacaatcactgcctcaaccacagccacctacacagtgggagtcacatccaacgtatctgccagtattacgactgggcagattgttaaggcttcaatctccgccggattttccaactcaacatcttcttccagatcgacctcctacaagtattcgcggagtatatctcctggtcgttatgggaacatgcagtatggcaactacggtgcccaggtaaacgtaaaaaagccaccattgtcgctccatgcaatgtccaagtgctcgcttctggaagcgcaatcgtgcccagtgcgaacgtatggggttaccgatattgggaaagctaggccattatgaacactcgactggcaacaaaaacaaaggccgcaatcatcgctgccgcgatcagcctattggctcttaccatcggcatcatatggatgatgactccacatggcagtagcaatgattctgcggcttcgaagcaacctgctaaggcacccgtttccgagcatgttctcgacaaacgctccgtgacaaaactcgataacgccgtacaggatgccgtagagctcaatcgcgaatcgttccgcgcgtcgttcaacgcacgtcccagctatcagactgatgagaccggtaaacgaaaaaccatggccattcttgatactgacagttcgccatgggatgccggcacctaccagctcacggtgtactgcatgggcagcgggacgctcaacgcgtcattctccatcggagaacagtacgaggattgcaccgtctcctgtacggacgacattgcgcaagaaacactgaccatacgaacggaaggtgcctctgagggtcaggtcagcatcgtgccatccgaagattcagtaagcgaaatcgcctactggattaatcatcccaacaactagcacagattcttaatctgtaccgattggtgaagattccacatccctgaaatctcgtcaatagaaagattccttcggagaggactcacccagcaagaagagtaggtatatcatgtggacggtgcacatagccgcccacatgatatacggatattgcagtgtttggtatgagcgccttccaactctcctataccaccgagcaactcttcgccgccggtatgctggcactcatacgcaaggaagcaccgacacaagagtacgtgcacatcattggcggggctcttggcaacaaacatctgatgcaatggcgggaacactcgttgtcgtttgagcgcatgatgcttaccgacaccgaattgtcagtgctgggcactaccgagttgaaacgcaatcttgccggatggtgcttagagggcattatcgactcagcttccggcttatgccagaaagtcgaagggggagccgctgctaaatagaaaacggcccctcagatgaggggccatgaggactatctagtgttgtatgtaagtttcctcgtgaaagggaaccacaacggagagattcagcgaggcagcatcatcggacgctggctggccttgatcggggccggcagctcgctcttttccttggagaggtactcgtccacggctgcggcgcaggagcggccttcggcgatggcccagaccacgaggctctggccacggccggcatcgccgcacacgaacacgccatcctgggaggtggcgaacttgtcattgcgagcgatgttgccacgcttgtcgagttcgacgggcagctggtcgaggatggtctcggtgtccgggtgcaggaagcccacggagatgaggaccagatcggcgggcagcacgcgctcggtgccaggctggcgagtgaacggaccattttcgccgggagccacggagacgaccttcaagccggtgacatgaccacgctcatcggccacgaagccttcggcggtggtcgagttatcaatggtgaccttggccttctcctcttcggtgccctcgaagttcacggagtcggtggagtagatgtactcgccgccctcttccatggaggaggtcttctggtaggtgcgggcgaaggtcggccacgggctgttgtccggacggcttgacggctctttcggcatgatctgtagcacggtgacgtccttcgcaccctgacggatcgaggtgccgaggcagtcggaaccggtgtcgccaccgccgatgacgatgacgtgcttgtccttggcggtgatgtcgtgcaccggcttgacgccgaagatacggcgcgtggcgtcgggcaggaagtcgagggcgaagtggatgccgtcgagctcgcggcccggaatcttcatatcgcgcggcacgcgggagccgatggccactacgacggcgtcgtaacggtcacgcaggtcatcccacgtgatgtccttgccgatttccacgttggtgcggaagcgggtgccttcggcctccatctgcttgacacggcggtcaagcagacccttctcaagcttgaagttcgggatgccgtaacgcatcagaccaccgatggcgtcgtccttctcgtagacgacgacggtgtggccggcgcgggtgagctgctgtgcggcggcgaggccggcagggccggagccgacgacggcgaccgtctggtcggtcagacgctgcggcggcagcggcttgacgtagtccaaatcccatgcctggtcaatgatggtctgctcgtcaagcttgatcatggtcggcggctggtggatgccgagcacgcaggcctgctcgcacagagccgggcagatacgaccggtgacttcagggaagttgttggtcatggacagacggttgtacgcgtcctcccacttgccctgacggaccagatcgttccactcaggaatcaggttgcccagcggacatccggtcatacagaacggggtgccgcaatccatgcagcgggccgcctgcgcttgggtccacggttgcaggccggtttcggcgtgaacgtcgaaccagtccttgatacgttcctcaacggggcgttcagccagctctcggcgggtacggaccttcagaaatcctctcgggtcgcccatgtcagcgcgctccttccataacctgctcgtacaccttttcccaggcgccgggcgcattgaaatctacattgttggccttggcctcttccatggccttcgtcatggccacgaactgcttcggcaccacgtgagtgaaccgcttgacggtctcgttccagtcctccagcaaagccgcagcgaactgcgaaccggtctcttcagcatgctgcttgaccagtgcgtacaccagcttggaggtttcggcatcaagcgacttgaagagcagtgcaccggacttgatggcacccgggttgaccttcttcatatcgaggtcaagcacataagtgttaccaccggagaagcctgcaccgaaattgcgtccggtggggccgagcaccacaacagtgccgccggtcatgtactcgcagccgtggtcgcccacgccttcgaccacaaacgtggcaccgccgttacgaacgccgaaacgttcgccggcgcgtccggccacgaacatctggccggaagtggcgccgaaaccggtgacgttgccggcgatgacgttgctgtgcttgtcgaaggtgacgttatcttccgggcgcacgatcatgcgaccgccggacaggcccttgccggcgtagtcgttgacttcgccgtagatgcgcatggtctcgccgcgcgggatgaacgcaccgatggactggcctccggaaccgtgcagggtcatgtcgatggtgtcgtccggcagaccttcctcgccgtaacggcgggtgatctcgtagccgaccatggtgccgaccgtacggttgacgttgcgaatcggcatttcgatgcgcacgggttccttgtgttcgagggccggctgggcaagttcgatgagcttgttgtccagcgccttctccagctcgtggttctgctcgatggtctggtgcaggatcgtgccgggtaccgggccggcctgcttgagcacgttggacaggtcgatgccactggacttccagcgcttgatggcctcgtcctgatccaagcactcaacgtggccgatggcctcctcaagagtcctgaagccgagctgggcgaggatctcgcgcacctcctcagcgatgaacatgaagaagttgaccacgtactcgggcttgcccttaaagcgggcgcgcagctcaggatcctgggtggcaatgccctgcgggcaggtgttcttctggcaggcgcgcatcatgacgcagccttccacgatcagggctgcggtagcgaagccgaattcctcggcaccaagcagggcggcgatgaccacgtcacgaccggtcttgagctcgccgtcgcactggacgacgatgcgggagcgcaggccgttcaggatcagcgtctgctgggtttcggacaggccgatctcccacggggtgccggcgtgcttgatggcgttgagcggggctgcacccgtaccgccgtcatagccggagataagcaccacgtcggcatggcacttggccacacctgcggcgatggtgccgacgccgaactcggaaacgagcttgacgtggatacgtgccttcgggttggccatcttcgcatcgttgatcagctgcttcagatcctcgatggagtagatgtcgtggtgcggcggcggggagataagctccacgcccggggtggcgtgacggaccttggcgatccacggcgggaccttggcaccgggcaaatggccaccctcaccaggcttggccccctgggcgagcttgatctgcaggtcggtggcgtgcacgaggtaatcggaggtcacgccgaagcgggcggacgcaatctgcttgatgcggctgtagcgctgcggatcattgatacggtcgtcggattcgccgccctcaccggagttggagcgtgcgccaatcgagttcatggcgatggcgagcgtctcgtgtgcttcctgcgagatggagccgtagctcatggcaccggtggagaagcgcttgacgatctcggaggccggctcgacttcggcgatgtcgatgggcttgcggttggtgttgaacttcatcaggccacgcagggtcatgagtcggttcgacgtgtcgttgatgtggtgcgaatacttcttgaacatctggtagtcgccacgctgggtggactgctgaagcaggaagatggcctcgggatcgttgaggtggtcctcgccggtgcgacgccacttgtagtcgccgccggtgcgcaggttgcggtgcggggacgcgctccactggttcgggtaggccacgcggtggcggatggccacttcttcggcgatttcttcaaggcccacgccgcccacacgggaggtggtgccggtgaagtattcgtcgatgacttcttggctcaggcccacagcctcgaacagctgcgcgccacggtagctcatgatggtggagacgcccatcttggacatgatcttgagcacgccggtggagagggccttggtgaggttcttcacggcggtgtccgcgtcgaccttgaggtagccgttgcgggccagatcttccacggattcgaatgccaggtacgggttcacgcaggcggcaccgtaagcgatcagcagcgcgacatggtgaatctcgcgcacgtcaccggcctcgacggccacggagatctgcgtacgggtgtggcggcgcagcaggtggtgctgcacggcggaagtcagcagcagggacgggatcggaccccacgtatggttggactcacggtcggagagcacgatgaagttcttgccgttggcgatggcctcgtcgatttcggcgaagatctcgtcaagtcgctcttcgagggccttgccgccgccggcgacctggtagaggcccttgaccacgtacgggcggtagtagccgccgaggatgcgggccttgtcaaggcgcttgagctgggccatctcatcagagttgaccacgggcagcgggatgaggatcttcttggcgtgcagctcggaatcggccagcaggttcggctcggggccgatggcggattcgagcgaggtgacgatctcctcacgctcccagtccagcggcgggttggtgacctgtgcgaacttctgggtgaagtagtcgaacagcatgcggctgcggctggaaagcgcaggcataggcgcatcgttacccatggaaccgagcggttccttgccggtgttggccatcggcgtgagcaggagcttcagatcctcttcggtgtagccgaaggcgcgctgacggcgctggacggactggccggagtggctgacgtgctcgcggcggggcaggtcgctcatttcaacggagttgccttccacccacttgcggtacgggtgctgggcagcgaggttcctcttgacctcttcatcgggaatgatgcggccttcggcggtgtcgaccaggaacatctcgccgggctcaagacgacccttggacacgatgtgttcctgcgcgatctccggcagaacgccggcctcggaggccagaacgatgtagccgtcatcggtgagctgccagcggccgggacggaagccgttgcggtcgagcagggcgccgacctgggtgccgtcggtgaagacgatgtcggccgggccatcccacggctcgataagcgtgttgttgtactcgtagaaggcgcgcacgtccggatcgagatccgggttcttctcccaagccggcggcagcatcatgcagatggcgtgcggcagggagcggccggcgaggtgcagcagttcgaggcactcgtcgaaggtgccggaatcggagtagcccggggtggtgatcggcagcagcggctcgaattcaccgagcagttcgctgctcaggcggccttcacgggcggagagccagttgcggttgccctggatggtgttgatctcgccattgtgggccagcagacggaacggctgggccagcggccagctcgggaaggtgttggtggagaagcgggagtggacgatggcgatggtggccttcatgcgctcgtcgttcagatcctcgaagaagtgggtgagctgcatggtggtgagcatgcccttgtacgtgatggtacgggcggacagggatgcgaagtagacgcccacctcatgctcgacgcgcttgcggatgcggaaggtcttgcgatccaagtccacgccggccagagcaccgtccggagaggcgaccacgagagtcttgaatcctggcatggcggcaagggcctgcaggccaaggccgtccgggttggtgggcaccacgcgccatgcgaggacttcgagtccctcctcgcgcacgatcttggcaatggcctgttcctgctgaccggaggtttcgatgtcgcggtcgaggaaggcgatgcctgcggcgtagtggccggcttcgggcagttcggcgggcacggtggcacgcatgaactcatccggcatgctcatcagaatgccggcgccgtcacctgtgttctcctcggcacccacggcaccgcggtggtcgagattgaccagcacctcgatggcgtcagtgacgattttgcgttcaggacgcttgttcaacgtggtgaccatacccacaccacaggcgtcatgctcgttggcgggatcatacataccgtccggagcgtggaccgtgagatcgagcggggctttgaatgtcaccggaatcacctcaattggttgtgggcacgtaagaaaatcatgcctcttcgttcattgctgttgacacagtaccgttgctccatgtcatttacgtttcatgtgtccatataccgagtcgccataaaagtcaatagtgattctcaagcaatttttttatggccagttatgggggtatttcgaactttttcgctcgaaatgtctatttgaccacacgaaaatacgatacggaaacgtccgtatcgtgaaatgctgcgttgggtgatgttacggattggcggctgtggaccaccctcagtcatgcttcgcatgacagctcccgccagcgggagcatgagaactgtgcatgtctgacaccatagcgatcggcgcgctccgcgaactcaccgaacatggcatccacgtgcccgacgacgtacggctcatgggattcgacggtatccccttctccgcctgcaccaacccacccatcagcactgtggcgatggacgtccccgcaatggctcgtacggttatcgatcgcatggtgacgctgaacgagtcgaacctacggcatgaacggcccgatgacatcacccatgaccatatccagttccaggtgatgccacgcacgtcgactctggccgcctgataccggccggcacccttatgagtgccggccttcatccttgaaaatatgaaggctatgccacgtacagcgcggcgggatacgtaagatacgaaatctcatcgagctgatcgaccgtcacatatccggctggcgcgttgagcacgtccggaatgcggttgacgattgtggcgcacgtatgttcgacggtcgccggcttgaccacgtggaactccacgtccggttcaccctcgatcttccaatcgcacatatcgccatcatccggcccgtacaccttgccgatacaggcagtttccaacgtgatgccctgattagtttcggtggttaccacggcggacatgccgatgcatttgccgaccggaatcgtctcgcccatcgtttcggaatacacgtcgacatcgctgaaatacggcacactggcctgggtctgcgatgcgatggtaagcccaagcttctgggccagcgcttcattggaattccatacatacgagggcaccacggtttcgggatgcgcgagctcggcctcgaactcctcggcggtcagaccgcagccgtgcgctttggccaaagccaggccgtattcctcgacgttgtagctcaccgcaccggtgatcttcttgatgctgtggcatccggcggcgacggtggagaccatgttcacccagtagatgtcctgcatgccggagccgaccatggtggcaccggcttccttggcgatgatgtcgagacggttcgtggtggccggatcggtggtccacgggtagatgcattcctcgcaggtggtgatcacgctgatgccgcgggccaagcactgctcgcacatggtggcgatttcgttctcgaagctgaatagcgtgactaccgcgatatccgcgtcgcactcgttgagtacagcctcggcatcggcgcgaatcggcacattgatggggccgatgcctgcaaacacaccggcatccatgcccacgacttccgggttcacgtcgatggcaccgacgatttgaatgcctttctcgtgcatatagcgaatcgtgtacttcgccattttgccgcagccgtattgaatggctttgattggttgcataccgcatgctcctttgcaacagtgcatattggccattggagaagtctcgccgtcgagaccaagccaatagcctttactctaccgacatcaggctgggcattcactgatatcggcggcactggagtgtcggggagagtcggtgtagcggtaccactaccgaacagaagggctggggccatcacgaggtctcccgccgaatcacggcatctcgctgattttctgcccgccgggcaggggcccatgcccatcggcgtatgcgccgctgatctggccgaatccaacgacccgagagaacgacgcgcaggggctcgaaacccttacagaactcatcacggcatacaacaaggaaatgagcaatgatttcccgcattgcaatccccagcggcgctcatccgtggaatatcgtatacatggtggccgagcgcattgccgaatcatgactgctcaccggcggtctcatggtgcagttgcacgccatcatgggcggtctcgacgtgcgtcccgctaccgacgcggatctgcttggcgcgttgattcttaagagcgccgcataccaagcagaccatgccggatatggagatagacatctgtacgatgccgcaatgctcgcatccctcatcaccgaccctgatgccgaaactcggcgactacatagccacacggatcgcagacgtatcaagctcccgtacgacatgctcaccgatgaatcaccttactggaacaaccttgacgaacaacatcgcagaacaggattcgatgccatagagacactggccgattggtagccgctctaccgaacccggctgtggcggataccagtcagaccaatcccgcctacaacctacttccggttacgtagggcgtggagcatggcgacgaacacgataacaatgaccacggccatgatcgtacagatgagtttgccggggatgcgttcgtcgcgggccgattgcatcacggcgtctgccgctgagatagtgcccgaggtctggggctgagtcttcagagttgccgattgttcaaaagtcatactctaacgataatgctacagaaagcggttaccataaagcgtgctcacagtcgcccgtcatgcggacttttcgaaaactgttgataaatagccattttccgcaaaagcccttgcaaaacactatgatttagaatatctattagtatgacgtaaaccatattacaaactacttaaggtaagcgcttacagttcggcatgagagactcctcaccacgatatggatgcgctacagtcactatgattgatacgcacgccccatcgactacgcgatttcaccgtcgccgtacgcgcgttcggaggctcgcagacacggcttgccttgcaccacctcgacctgcgagggcggcgcgtcatcgccggcgcgcttggcctggatctgttcgaacagcattcggaaggatcgctcccccatgtccaggaagttctgggtgtaactggtcagcgccggattccacatggcaccgaagttgcggtcgtcaaagcctacgacgctcacgtcagcaggcacgcggcgaccaacctcccttagaccccggatcacagcgatggcggtctcgtcgttgccggcgaaaatcgcagtcacatcaccacgacggcccaaggtgcgcccagccttgaccgactcctccaaatcatcgtcgggcacgatgattgggtcaggtgccgtgacgccgcgctccttgagcgcgtcacgccacccattggtgcgggtgttatcggtcggaccttccggacgccccacatggaacacggtgcgatggccgagatccagcagatgcatggtcatccaacggccgccatccctttcggcgttgatgacctggtattcgccgtcgccgaagctgccacccaccacgaccatcggcatatctttgggaatgtattccagtgcggcgatgccggcccggtcgtactcgtagacgatcacgcccgccggcctgatcgacaaacccatgcgcacgcgagccttgacggagtccatgtcggactcgtccaaagaaacaatattgagcaggaaccgacgtttacgggcggcggcctccaccccatggttcgtttcggacgtggagaaggcggaaggattggccgcgaacaccaccacggagtccatctcccggttcgacagagcgcgcgccacaatgctcggctcgtagcccagctccttgatggccttggcgatgcgttcacgcttgtcttcggtgacgttgacggtgccgttgagataccgggagacggtcggtgccgagactccggccagtttggccacgtccttgatcaccggccgggtgcggcccgcacttctcgccatccttgtctcccctgttgttgtcagttgttgttattgcgtatgttagagaaccggcatcactatgacagccatccagtcacacccatatccgttcagccgcgctccgacttcggttctccgtttttcgccgcgattcattgtagttcatgacggggaacctatacccaaatcgataacttcgtgaaaaccgtacgctgagttgcggtgagtgtacggtttccgcgaaatcatccctaatttcgtgaagaacgtacactgaatcgtcgtcaacgtacggttttcacgaaatggggcctcatctcgtgaagaacgtacactgagtcattctgagcgtacggttttcacgaaatggcagctgatttcgtgaagaacgtacgctgaagatgcccccggtgtcactgatgactgttttcggtatggaaggcggcgcagcaaggtgtcctaggctaatatcgcctccgacaagaccgtcggcaaagccgtcgacgtcgattcaagttatccacagcaacaattcgcgtgacatagtatccacatttgccggttgagcttgtgcaacgatcaaaatcacccttagcgtcgagatatgaaagaacacaaggaagtttctgcactgctgcagcaggcgaagcaggagcgtcgctgctgctatggcaccagtgatgcgcaacggcgcgccctgaaacgtcgcctgcatgccggggagctggtgtcaccgtataagaacctgtacgccgaccgaacactttggaacaccatgaccagagagcaacagtcattgcaggtcatacgtgcgttgtccgcaatccaccctcagtgggtatttgcggggttgagtgcggcgtgcgtatacggactgcagcacaactattccctgcacgacggcacagtgcacatcgcctcgaagtccggcatcggcggcggagacgaggcgcgtctcaaccgcatctatatcaatcggattccgacgcggaagcataacggcattctcttgacgactccggcgcgaacgctgctcgactgcgcggtattcccattcccacaggcgctgcccatatacgattcggctctgagaaagtccctgacgaccatcgaagaggtgcagtcgctgatgattcaaagcgtctgcgacgaggtctccgtgaccaagctgctgaagtacgcggatcccctgagcgaaaacggcggcgaatcattgatgcgtggccagatcaccgaattgtctttcggcatccccctgctgcaggtgcagttcatgaatcccgacaatcccgcaatgtcatatcgcgtcgatttctgttggaagctcgcagacggccgcatcatcgtggcagaatacgacggcatggccaaatacgccgacatcagcaacaagaatcgcgcaagcctccaggcgaaaatggagtacgaccgcagacgtgatcggcatctccgggaacagggcgtcaccgaaatcgtccatgtgttctatgaggatctgctacgccccatcaatcttgagaccaagctgctcaaggccggtgtgcccaaaatccggtgaagataggccccatttcgtgaaaaccgtacgcttacgacgactcagcgtacgatttccgcgacatgaggccatacctcgtgaaaaccgtacgctcagaacaaggccgtcagaaggtcgactagacaacctcttaactaccgaatggtatctaaagaacggcgatattccgccagaaacgccgagagcggaatagtccccttgcgtttgtcatcggactgcgttattctgaaaccggtttcagaaagaagccgataaacaaaactcaaagccccaaggttttgaccaacgaaaggaaacatgatgtctctcaaggattccatgattcgcggtctggctgtgtacggcctgagctccatgagccagtgcggtcgcgccaacagcagcacgctcgtcgacctgatcaacaaagccaacaagaacgctcgctgagccatcggctccggtccggcaatccaatcagattagccacggaccccataacaacaaagcttaaacaacaatcgcaaagccgctcacggcgatgcgcaaacgaaaggtaatgattatgtctctcaaggattccatgattcgcggtctcgccctctccggtatggatgccatcgcccgcgccggctacgccgactccaagatgttcgccgacatcatcaacgccgccaacaaggacgctcgctgaatctagcgaacaatcccgttcatgagattgcatgacacatacgaaggcaatccccctcaggccgcaatcggccggcacaccacaataattgaataacgcaataattcaacacagtaaaactgaacaataaccgggacaacggggtccatatattctttcttttcccatcgtgcgtacgccgcgccagcacaggttcacatacgatgcacacggccgccaatacacgatgcgtcatcatcaacgccctcaccgcatcatgagatactcccccgtccgttgtccacactgttgcctctacaatgcctgtgatgcacgccgaacggcatcctgcacagtgactgaagaacgaaacaccaagggacggaaatggataacgaactcttcgaaaaggcgccgattccgaaggcgtatttctcgctggcgatgcccgtggtgctcagcatgctggtcaccttggtgtacaacatggtcgacacctatttcatcgcgcatacgggaaacaccgatatggtggcgggcgtctccctcaccgcgccagtgttcaccgtgatgatcgccctcggcgacatcttcggcctcggcggcagttcggtcatctcgcgcttgttcggccaacaccggttcgccgacggcaagcgactcagcgcgttctgcttctatgccgccatcgccaccggcctgctgattctggtgctgggcctggcgttccgcgacccgatgctcgcgctgctcggcgccactgacgacacttggcagtatgcctccgacttctacacgctgatcatcgtcggctcgccgttcatcatcgtgtcgatgacgccgtccaacctgctgcgcaccgaaggccacgccgtgcagtccatgatcggttcggtggccggcacggcggtcaacatcgtgctcaatcccctgttcatccacggattcggctggggtgctgcgggttcggccggtgccaccgtgatcgccaacatctgcaccgacgcctatttcgtctggttcacgctgcgtcacagcagcaacctgtccatcgacccgcggaccgtcatcgaccgcgcgcggtagtgcccgaaaagttgcgcactttggatcgtggccgtccatggcgcgatagtcagttcgcttccacgaggttgtcaccgagccgggacatgtcgagatagcggcgggtcgaccattcgttcgcggtgacgtgacggatgcgggcgcatatgagcatcaacgcgctgttcccgtcggggaagccgcccaccacgcgcgtgcgccggcggatctccctgttcagccgctcgatcatgttgttcgtgcggatcctcctgcggtgcccgtccgggaactcgtccagcaggtaggtcgtcgtctcgccgacgccctcgcgcaggcagttcgcggcggccttgagcctcctggattccatctccgtggcgacctgttcggccttggccagggcggattcccgggattccatggcgaatatggccttgagggcggcggacgcccattcgcggtgtgtcggcggcgtcttcgagagcacgttgcgcatgaaatgcaccatgcaccgctggtatctcgccttgggcagcatcgagccgaccgtggcgacgagtccggcgcaccggtcgccgaccaccaggcgcacgcccttcaggccgcgttcgatcatggagcggacgaactgctcccagctgtccctgtcctccttcatgccctcggccacgccgatcacctcgcggtgcccctccgcgttgactccgatggcgaccaggacgctgacgttctccacgtgcccgccccatgaacgcttgtgccacacgccgtccatgaacacgtacgggtactcgtcctccaacggcctcgtgcgccacgcctcgatctccccgtacaccttcttgagcttgtcgctcagggtctgggacggcatcctgtcgccccacagcaattggctgatgtcgtccacctgccgggtgctcacgccggccaggtacatgtcgatgagggcctcctcgacactctcctcgcgtctccggtatcgttcgatgaccgcggactcgaagaccgcgcccttgagtttgggcaccttcaacgcgagcctgccggccttggcggtcaggctccggtcgtagtggccggccctgtacgccttccgctccccggtgcgctcgtacttggcggcgttggcgatctcgtcggcctcggcgtcgagcatcgcgttcaatagctcggcgaccttttcggcgaccaagcggtcgagcctggtctcgagcaggttctggtcgatctgtatgatgttctcgggcatggttccgtctcctggcttccaatcgcggttttttgttttggcgaatgaaaatcgtacacaggacgcgggccatgccctcttacgtcagacccggaatccgaaagtgcgcaaaaaatcgggcgttatcccgcgcgcgccggcgtctggcggtcacggcccgggaggtcgggagcatcctcgccatcggcatcccctcggcgatcacgaacctcacgcagagcgtcggcatcgtcatgatcaacctgttcctgctcccctacggtaccgacgcggtagccgcgatgggcatcgcgctgaaagtcatcatgatcgcggtgctggttttcgtgggattcgcgttcggcgcgcagccgctgatcggctacaactacggcgcccgcaatatgcctcgactgcgcggcattctgcgtttttcctacctgttcctgtccctgttcgccctggtgatgaccgtggtgctcagcctgtccgaccgtctactgatgggattcttcatcgaggacgccaccatcatcacgctgggcgccggcatgctgcgggttcagctgctgagcctggtgtgcgtagccgtcgtgatggtcacgacctgcaccttccagtccgcaggcaaggcggtcggcgcctttgtgctgtcgatcagcaggcagggtgtgatgctggcgattaccctgttcgtcggctcccggctggccggctatcagggtgtaatcgccgcgcaggccatcgccgatctgctgaccgcgattgtggcggtcatcctgttcgtcgtgatgttgcctgagctgcgcagtcggaaagctcgctgatagagcaacacgaggtttagcagacacgcattcggagagccaatacgctgcgtaatattgcgcgcgatattgcgcaatgggaggcggtgccgttttgttggactcatcgttgattccatcaccaccaatcatgtcacaagaccgagctcgcgtcgacgatccatgataccagttccacgatgccggtgtcgctatctttgcgatacacggcggtcagttcgccgcagctcacggtttccagtgtggcgcgcacgtcttcctttccggtactcgctcccgctgcgggagctgtctcgcatagcgagactgagggtggttctcagcgctgccccccccagtcgggcgaagcccgccagcccccgccagcgggagcctgctcacagttgtagggttcgtacgatttgttcggtggtgcgggtcacgttggcggccgcgtcggccagcagttcgctgaggctggcggctccgggcgcgatgccgaataccgcgtcgatgccgacctcatgcagctcatcgatgccggtgccaatatgcccggctactgcgatgaccggcttgccgtggcgcttggcggtttcggccacgccggccggcgtcttgccgaacttggtctggaagtcgatggagccttcgccggtgaacaccacgtcagcccattgcgcggccgcatcgagtccggattgttcgatgacgatggcgatgcccgggcggaattcggcgtttaggaagcccttcagcgctgcaccgatgccaccggccgcgccggcacccggcacgtcgttcacggcaacgccgagctggctgtcgattacctgcgcaaaatgcgcgagggcggcgtccaatgtggcgacatcatctttggacgcacctttctgcgggccgaacacggcgctggcgccggtggggccggtcagcgggttggtcacgtcgcaggcggcggtgatggcgacgttcttgagagccgggtccatcgtgctgatatcgatggtggtcagattggcgagggccgctcccccgtgtgccaagtcgttaccgttcttgtccagaagacgaacgccgagggcctgcagaagtccggcaccggcgtcgttggtggcgctgccgccgagcccgacgatgatgcgcttggctccggaacggacggcggcgagcatgagttcgccggtgccgtaggaggaggcgatcaacgggttgcgttctttggcttcaagcagtgccagtccgctggcttcggctgtctcgaccacggcggtcgtgccgtcggcgagcagaccgaagtggccttcgacaggccggccgagcgggtcgtggaccggcacggcgcgcatcgatccgccggtggcgtcgacaagcgcgcgtgcggtgccttcaccgccgtcggccatgggaaggcaacggacctcggcatcgtggtcggcattctcaatcccctgagccatcgcccgggccgcctccatggcggtcaggctctctttgaaggagtcaggggcgcataagtatcgcgtcatgcttcgagcataccgcacgacacgacgaaacggtaaacgttttccgtaattcgcgtgattatttttttgttcagaattcaggctttccaatccacaatgctactattgcaagcaaaaatgcgatatcgttgcggtaaacgtttagacacgttttccgtttcagggaagaaaaggatcgattcgatcgtggctgtacagaacgataaggcgcaatcgccagcgacattgatggatgtcgccaaagaagcccaagtctccatcgccaccgcatcccgcgtgctcaacggcagcacccgcaaggtacgcaaccaatcgtatgtcaaggtgatggaagcagccaccaagctcaactatcgtcccaacgcctatgctcaggcagtggccaaaggcaccgcaccgaacatcgtgctgctggtctccgatatctccgatccctacttcgcatccgtatcgcaaggcgtggtcaaggcggcggccgaacgcggcatttccgtgaccatcggcgtggcagccaccccgcacgaagagttggaggcggtgcgtaagtccgtatccaccaggccgcgcggcatcatcatctccgaaagtgaatacaccgacgcgccggaacgccaggcgttgcagacggaactcacccagtacgaagcatccggcggacgtgccgtgttcgtgctcaaccgcaacctgcccttcccggccgtggacatggcgaacgatgtcggcgcgcgcgccatcgcaaagctgatcgtcgattccgggtatacgcgccctgcgattctcaagggcgatgacgcacatcgctcctccaaagaacgactggccggcgtgatggaagtgttggacgaggcaggcatcaccgtggatccgaaagccgtggcgaatggtaagttcagccgtaccgacggctatgcggccgtcatgcaaatggcccgatccggactgctgaagccgggcgaaggcgcactgtacgacggcaaaggcatcgattcaatcatcgcgctcaacgacgtgatggccatcggtgcgatgaccgcgttgcgcgccaacggcatcgagccgggtcgggaaatcggcgtcaccggtttcggcgacatcccctactccgccgacgtgtttccgccactgaccaccgtgcatctgccgctggccgaaatgggccaggccgccgtggacagcatcctgtccaaccgcgatgacggggaggccaccggcggcactgccaaccgcctgatctacgtgcaaagcgccccggacgtagtcctacgcggttccctcccccgccggtaaaacaaaaatagctccctctgacggtgtaaccacaactagcgaacaggtaatggcgactgccgcgcaccataccaccgactcatacaccgacgaaatcgaagaactgttcgattaccgagtcattgagcaaccggccacgacgagtgggcaccactcgatgattatcggatacggtaatcaggccttcgctgaccattggggcgagttggtcaagggaaacattacggagagtctggggcgtgctgctcatacccgcatcgttgatggcgcggttgatgcggtcgaggtcaaggccctcgtgcaggcgcagcccgagcatgatgagctcttcgaggttttcctcgggagtgatcgtctcgctatcggcccacggcacacggttctcgttgatggccgtgccccacaaacgcgggtgcgcgatgtcccagctgcgcagaccgtgtgagacagaaaccacccccagtccggcatccgccggacaacccccgccagcgggggcatgaatttcttgggagttgttcccatgcgcgttgatcatacctagttcggcgttggcctgtccatcagctgaggcagaggcaatggcttcggacttgctcccgccagcgggggctgtcagcgaagccgactgggggtggtcagcctcggtcaccgcgttgtagtgggagtgggcacctggccctagaccggcccaatcaacgttgcgccagtagccgaggttgtgctggctttcgtatccggggcgagcccagttggagacctcataccattcgaggccggcggcggcgaacaggtcgtcagcgatctcgtatttagcggcctcgtcatcgtcattgggcttgggcagagtgccggccgcgatttgacggcccattttcgtggtgggttccacggtcaatgcgtaggcggagatgtggtttacgccaagatcgatggcggtcgtgaccgaggtgcgccaatcgtcaaggctctcccccggagcgccgtaaatcagatccacgctggagcgcagcccagccttgttcgccgcattgacgcctacggccacgttggccggcgtatgcgtgcggtcgagggttttgagcacgtgcggcacggcagattgcatgccgaaggaaacacgggtgaagccgccggcagcgagctcattgatgtaatactcgttgaccgtgtccggattggcttcggtagtgatttccgcgtcgggcgcgatgctccagatcttgcggacggcatcgagcatggcgaccagatcgcgggcggcgagaattgtgggggtgccgccgccgaagaacacggtggaaaccggcggctcctcgatgccgtggtcgagctgccactgcttggtcaatttcatttcccgaatgaccatattggcatagttgccgcgcgaggcccccgcaccaagatccgtagccgtgtaggtgttgaagtcgcagtaaccgcagcgccgcaagcagaacgggacgtggatgtagacctcgaacactagccctcggtcttctgagcggcgcggatcttgtctttggtgtcgcggtcgttggagtcctcgccggtggacagggctgcgatgaacgcctcctgcggcacctccacatggccgagcatcttcatgcgcttcttgccagccttctgcttttcgagcaacttgcgcttacgggtgatgtcgccgccgtagcacttggcgagcacgtccttgcgtaacgcacgaatgttctcacgtgcgatgatgcgcgaaccaatcgcagcctgaatcggaatctcgaactgctgacgcggaatcagactacgcagtttcttggtcatcatcacaccgtacgaatacgccttatcgcggtgaacgatggcactgaacgcatcgaccttctcgccctgaataaggatgtccaccttgaccaaatcggcggactgctcgccatcctcatggtaatcaagggaagcgtagcccttggtgcgggacttgagctggtcgaagaagtcgaacacgatttccgccagcggaatgcggtagtgcatctcgacacgatcggtggagatgtactccatcgtgcccataatgccacggtggtcctggcacagatccatcaccgcaccgatgaattccttgggcgtgatgatgtcggcggcaaccatcggctcgacaatcttcttgattttgccgtccgggaattcgctcgggttggtcacatgatgctggctgccgtcctcggcggtcacgtcgtaggtgacgttcggggcggtctggatcaggtcgaggccgaactcgcgggagagtcgctcgttgacgatttccatgtgcagcagacccaggaagccgcagcggaagccgaagcctagggccacggaggtttccggcgtgtagatcagggcggcgtcgttgagcttgagcttgtcgagtgcatcacgcagttcggggaactgggcgttgtcgatcgggaacaaaccggcgtagaccatcggcttcgggtcgcgatagccgggcaacggctcggcggccgggcggacggccgaagtcagggtgtcgcccaccttggactgactcacatctttcgcaccggtgatgatgtagccgacctcgccggcaccgagtgccttggtgcgggtcatatcggggctgatcacgccgatttcaatgggatcgtgggtcatgccaatgcccatcatgtggaccttttcgcggtcgtgcagttcgccgtcctccatacggatgtaggtgacgatgccgcggtaggagtcgtagacggaatcgaagatcagcgcgcgggcgggggcatcggggtcgccgtgcggggcgggcacgtccatgacgatctggtcgagcaggtcggccacgccttcgccggttttgccggagacgcgcagcacgtcgctcggctcgcagccgatcagacctgcgatctcctcggcatgcttgtccggttctgcggacggcaggtcgattttgttgagcacggggatgatggccagatcatggtcgatggccatatacagattggacagggtctgcgcctcgatgccctgggtggcgtcgacgagcagcaccgcgccttcgcaggcggccagtgcgcgggacacctcataggtgaagtccacgtggccgggggtgtcgatcataccgagcgtgtattcggtgccgtcaaaggtccacggcacgcgcacggcctgggatttgatggtgatgccacgctcctgctcgatatccatacggtcgaggaagcgatcgcgcatctctcgctcgggcacaatgccgctcaactgcaagatgcggtcggccacggtcgacttgccgtggtcgatgtgtgcgatgatacagaagttgcgaatcaccgactgatccgtggaacccggctgattgtgttggacgaccaacgcattcctcctcttggcatatactcaaacttcacctagtgtagccgagggactgtattcggcgtggcattgcgcgggtttttccggggctcatgctatcctctaacttttgtatgtccttataacacacatcgtttggagtaaacgtggcaaacattaagtcgcagaagaagcgcgtgctcaccaatgagaaggcgcaccttcgcaacgtggctgtgaagtccggcctgaagaccgccatccgcgccacccgcgaagccatcgccgccggtgacaaggctgccgccgaggccgcctacaaggttgccgcccagaagctcgacaaggctgctggcgctggcgtgatccacaagaaccaggccgccaaccgcaagtccggcctcgctgttgcgatcaacgctctgtgagcataagcctcttaaggttttagaaagtcccgcaagtcatctggcttgcgggactttttgtatctccgttcaaagaggtacattggcggtcttgcgaaatgacatctccgttcagagaggtaccgaatacgggaaaaaccaactataaacgccatcattgcaacacttatactcagcgtttcgtgcttcaggtacctctttgaaagcagttagcattctgcagaaggccagatgtacctctttgaagacagttagccctgaggcggccttgaaccatcctgaggcttgtcttcttcgtccttggtggtatcgccgggatcgacggtatcggcgtgcggatggatgaccgggcgcttgagatatcggctttcgctgggcaggtagacgcgatgacgttcgacggctccgggcagagtgacgttgaagcctaccgagagcagtcgcagcgccaccacgatgatgacgatcagcacgtcgagcagcatttccgagcgcatgtcgaaccagccgtagcttacgccgcgccataccagcacggtcaggatgcagccgatgaacgaaggcacagcatagaggtgtttgtctcgaataatcattggcacgtcgccaatgaagatgtcacgaatgaggccgccggccagtgctgtgaacatgccaaggaatacggctgtcatgcctgaggaaccgtaggccagagcttttgcggtgccgctgactgcgaatagtccgaggcccagagcatcgatgacagtcatcgtccatttgagtttggtgatctccggatgggccaccaccacgataatgccggaaaacagcgtggtgagcacatagcctttgtcggtgatgccgaccggcggcagggcaccgagcatcacgtcgcgcacaagaccgccgccgagtgcggtaagccatccgcacagcatgatggtgaagatgtcgtagcccttgcgaatggcggcaagtccgcccgataatccccaacacaggattgctaaatactcgatgaccacaaaaacgatgttgttctccaacgccacctgcatgagccactcccctctggtaccgcttcggttcgtctcagtccgtcttcgttctgttcccgttcatccttattcggcgctacagcccgtcgtacccgagcctacaacaggccttgcctgagtagtatggccggggaggaaggggccactaagacgtgaataggatggcaatgacgccagcttgccggtagtcgttggcaactcagcacctctaagttttacgatccgtgatcaaaaaacatgtatggacttaatcgttgttgatttctgattcaatcaaggcgactttttcttcgacatcacgcaagcgattgcgcagtgcggactcgatatcgatgccgtcaacgcgggccttgcgcacgacggcgaggatttcatcggcgtaggcatcggccttctcccgttcagcggaattgtcgccgcttgattcggattggttcgccgcttgaggatgtacatcatctcgctgagcatcagccgcagccgactcatcaaacgccgcgaacaatctatcagcattcggcgatttggagatacgagaaacgactttggccgcgcgaggcaacgcaccttgaacgcgggaaatgccctcaagcacggatttacgatgcttttcctgctgtttcatcttttcccatagagccagcacagcttccggggattcgggttgggcagcttctcccccgtcgttactgtcagcatcaaaagcatcagaagaatcagaggaattgccggcatcatcagccgcaaacacatgcggatgccgagtgatgagcttgttcaccaaccgatcggcgacctcatcaataccgaacgggtcctcagtatccgattcgcagacccgcgcctgaaacacggattgcagcaacacatcacccagttcctcgcgcatgttgtcacggtcgtgagtctccaccgcgtcgacgtattcgtaggtttcctcgagcagattcttgagcagcgacttgttcgtctgcttgccgtcccacgggcagccgcccggcgaatacagcacatccaccacggccttgacccggtccagcgccgtcgctgcctcagccaccggcttcaatttcgagcagtgttcgaagcctgacggcaaacggtaggctgaagcatggtattccgtcatgtcactcatcttgctcataggtttgctcctgttctcatctggatgaaccataaccaccccccgcaacgtgcagaagacctagatcatattatttgttgcggaatgttgctaaatccatctgtatctctctagccaagaacatttccaatacgccaagaccccttggaattgttgctgttccaaggggtcttagtcagaaacaaaaggcgattcagcacactttccacatccagttgtgcgggtcctcgacttcgccgagctggatgccgagcagctcgtcacgcagttcgcaggtgagcttgccggagccgccgtcggcgacggcgacatcgaacttctcggacttgaagcgaccgatcggggtgatgatggctgcggtgccgcaagcgaacacctcggtgacctcaccggacttgatgtcctcgagcagctggtcgagggcaatcatggtctcgactacgtcgtggcccttgtcctgcagcagctgaatcagggagcgacgggtcacacccggcagaatgttaccggtcagggacggggtctccacgtggccatccttgtgcacggccatcatgttcatgccaccgagctcttcgaggtaggtcttggtggcggcgtccacgaagcacacctgctcgcagccgttctcaacccccttgtactcgccgagcagggaggcggcgtagttgccgccgcacttggcgaaaccagtgccgccagggccggtgcggaaccacttgtcttcaacccagatgctcaccggcttgacgccgcccgggaagtacgggccggacggggaggcgatcacgcagtagtcgacttcctgcggggcgcgcacgccgaggaacggctcggaagcgaacatgaacggacgcatgtacagcgtgtactcgcggcgggacggcacccagttggcgtcgcgcttgaccagcgcggccacggaaccgaggaagtcgtcaatcggcagctcaggcaggtacagacgcttggcggagttctggaaacgctcggcgttcgcatccgggcggaacagccaggtggagccgtcggcatgacggtaagccttgaggccctcgaagcactcctgtgcgtagtgcagcacggaagcacccggatccatcttgagcggtgcgtacggttcgacgcggcggtcggaccaaccttcgcccttggtccaggtcatgtgggtcatgttgtcggagaacacctggccgaaagccggcttgtcgatgagggactggcgcttctcatcggatgcggggttgtcgttcggcagtacggtgaacggttcggcgagcttgtcgagcgctgccggatcgtggtgcgtgttttcagtcattactagctacttcttcttgactttggcggcccgaaagccaccatatggggtgtgtgctgtgcgcttgtggcgcgagctctgttgcatacttttgcacacccatgtgttactcgtgtggcagagttcacatggtgaaaaaacgaagaagcccgcaccgttctcaacggctgcgggcttccacgtttcagttatgttctgaattgttcgctatcgaagcgatcgactcacttggcgtcggcagccggagcagcagcgtcggcagccggagcagcagcttccggagcggcggtggactcagaagcatcttccggcacctcaacggtgacgacggactcttccgggtcctcaacgtcgagctcaacgccttcaggcagaacaacgtccttagcgaacaccttggtgccgtcggttaggccctcgacgctcacaacgatcttctcaggcaggttggcgacgtcagcgcgaaccttgagctcctgaatgtcgacgaatgccacagcagcgcccttcggggtgccttcaacgaagaccggcacctcgacgtcgatcttctcaccggccttgacctcaaggaagtcaacgtgctcgatgatgcgcttgaccgggttcttctgcacgtccttgacgacggccatcttggtgttgccgtcgaaggcgatggtgaacagggcgttggtgtgacgcagggccagggtggtctcgcgcatcggcaaggtcacgaaggcgggctcttcgccgccggcgtagatggtggccggaatcttgttggcaacgcgcagacgacgagcaacgcccttgccgaactcggaacgggcctcgccctcaagcttaatggtggtagccataatggatactccttgtagtttcgtttcgttctgtctcgctcagacgccacgacacgccgaaagacaccctacaaggagtgaaatacaccgagtcgataacggaagctgtgtcatgtgtcagcacgcacacttccctcgccaaagcaacaattgtcaagtatacgccaactccggactttggcgcggtgatgcttcgatgacactgcatcccggccgtcccagccacgtcaacgtacggtttccgcgaaataatccctaactttgtgaagaacgtacgcttacccgttctcatcgtacggtttccgcgaaatcgtccgccatttcgtgaagaacgtacgcttacccgttctcaacgtacggttttcacgaaatcgtccgccatttcgtgaaaatcgtacgctcagcgacactcagtgtacggtctttcacgaagttggggatgatttcgaaaataacgtacgatggtgagtaccgtatcgggaggttgatatgactcgttcggacgacgtcatcaatgaggatggccatgacgtcatcgccgcacacactcgcgttgtcaggggtatggctgcggcacttgccgcgatagccgccacaggagccggcgtcacagccgcggccgccaacgtcatgttcacgttcgcgctggacaccaaggccaaacgttcgatgttcaacatgccgcacgaggagacaccgaaaggcatcgaattcgacatgtccgagcagcttgaggccgcccggtggttcgaggaggccaagcaatcggtcacgctgcgcagccatgatggattgaaactccacggctggctgttggacccggattgttccgacccacagccgcatctatacgcgatctgctgccatggctatgccggagagcccgcggaaatggccaaatgggcgcatcgctatgcgcaactcggttttacggtcctgctacccgcgcagcgcgcccatgagttgagcgaagggcgttacgtgggtatgggattgctggaaagcgacgatctgttgggctgggtttcgctgatcaccgcagctgatccggatgcacgcattctgttgcatggcaattcgatgggcgccgccacggtgatgatggcggccggcgatgcgcgactcccccgcaacgtcgtcgccgcgatttccgattgcggatacagttccgtggtctcgcagtttacggataatgccgaggcgatgttccgtttgccgcactcgttggccgtgctgctggtcaaagtggccagtcatgtgtctgaacgcaaggctggataccggtttgaggacgcctcctgtgtgaaggcattacggcacgcgactattccgatgatgttcattcatggcggagcggatacttttgtcaatccgaagtatctggacatcaattacaacgcctgcgccagcatcgaccgcgagaagctgctgattcccggcgccgaccacacgatgagcgccagcaccgatccggaccgctattggcgtcgcgttaacagctttgttaagcgggtgtttgggctgtagtagatatagagctcggctcccctctgtgaggggagccgccagcgaagctgactgaggggagcacccgcgtatgggctactcccctcagtctcactccgttcgacagctcccctcacagaggggagccaagaatggttacgcgagcaattccttgacggcggcgatgacggactgcagactcttcttcgcgtcaccgaacagcatctgggtgttgtcttcgaagtagagctcgttctggatgccggcgtagcccataccgcggccgcgcttcatgaccacgacgttctgggacttgtcgacgtcgagaatcggcatgccggagaccggggtgccgggacggcgagcagccgggttggtcacatcgttggcgccgacgaccagagccacgttggcctgcgggaactgcgggttgatctcatcaagatccacgagctcctcgtagggcacgttggcctcggccagcaacacgttcatgtggccaggcatacggcctgcgaccgggtgaatggcgtaggagacttccacgccgtggcccttgagcagttcgccgaggtcggcgagctcgcgctgggcctgagcctgagccaaaccgaagccgggcacgaagatgaccttctgcgcgtagacgagctgaacggccagatcgtccggcgtggtctccttcatggttccttccggaccatcgccagcagcggcggcgtcagcaccaccgccgaagccaccggccaagacggagagcagcgggcggttcatggcctgagccatgaggatggacagggtcacacctgcggaaccgacgagtgcgccggccacgatcagggcaacgttgtcaatcgccagaccggacatagccacagccgtaccggtgcatgcgttgagcacagagatgacgacgggcatatcggcgccgccgatcggaatcacgaacaccaagccgtagcacagggcgaacacggtggtcagaatcgaccacagcagacgctgttcgggctggacgcacagcatgaccagcgagacgacagacagcacggcgaacagaatgttccatacgcccttgcccggcaggttcagcttcttgacccacttgataccctgcagcttgccggctgcgatgagcgagccggtgaaggtcacagaaccgatgagaataccgagaccagcggtgatgagcaccacgatgtccggggtgccttccttggtcaggatgtcgttcagggccacgagtgcggcggcgccaccacccacggtattgaacacggagaccagctgcggcatatcggtcatcttcaccttcttggcggagacgacaccggccacggcaccgatcaggatgccgacgaccagcaccaccacggcgacaatgttcacgaagcccttggcgaagagcacgatgaacgccatgagcacggccacgaccatgccgaacgcggagatctggttacccttgcgggcggtcttcggcgaattcatgaaatgcagaccgaccacaaacaggacggcagagaacaggtagacgaaccaagcgacgatgtcgatggcgccaacggttgcggaggtcattacttcgactcccccttcttctcgttcttgctggacttgaacatctcaagcatgcggtcggtgaccacgtagccaccaacgacgttcatggtgcccagcacagcggccaggaagatgaacacgtaggccagcggtctattggcttcggctgccacgatcacaacgccgacgatgacgatgccgtggatggagttcgcgccggacataagcggcgtgtgcagggtggcgggcaccttgccgatgacctcgatgccgatgagcagcgcgaggacgaacagggtaatggaaacgacgagagtaggcatggtattccttcttccttacttctcggacttctcggcatcggcagcagctgccggggcggcggcgcggccggcaaccaccagcgcgtcgtcgagttcttcggtgagatcctggccgagcttgccgtcacgcacgaagtgcacgaggatgtcggccacgttgcgcgaaagcaggttggatgcggtggtggcgacgccggaggccaggtagggagcgccgatcagcttgacaccgccctcggtgacctgctcaccaacggcggagccttcgacgttgccgccgaggtcggatgctgcgcagtccacgatcacggcaccacgcttgagacccttgacgccggctgcggtgagcagcaccgggggcttacggcccgggaccttggcggtggtgatgatgatgtcaaagccggcggccttttcgtcgacggcagcctgctgctgagcctgctcttcggcgctcagcgcgcgggcataaccgccctcgccctggcccttggagaagtcaagtcccagatcaaggaacttcgcgccgagggactcgacctcgccctgggaggcgggacgcacgtcgtacgcggtgacgaccgcgccaagacgcttcagcgtaccgatggcctgcaggccggcgatgccggcaccgagcaccagcgccttggccgggcgaatcgtgccggcggcggtggtcatcatcggcaggaaggaaccgtaagcatcggcggcggtgatggctgccttgtagcccatcacggagttctgagaggtcatctcatccatggactgggcgctggaaagcttacggggcagcttttcgatggcgatgcccaccagaccggccttctcgagcgcggccacgtaatcggcatcggtgaaggaaccgagcatgccaatgacccactggccggccttgagcttggccacggtctcggcggacggtcggtccacaaaaccgagcgcgtcggcttcggcgagcacctcgtcacggctggtcaccttcgcaccggccttttcgtaatcctcatcggtgtagtcggcagcaatgccggcacctgcttcaatcagtgaggagacaccgctcctcttcagccgggtgacgatatccggcgtcagcgcgacgcgggattccgtttcggacgtttcgttcaaaacgccgaacaccacggtggcttctgggttttgcgccatgagagccctttcttgttctacttcaaaatggacatggttatccgcatggtaagtgtagtcgaaaggtaaagaccatgacttgagattccgccaatcgaaatagaaacgaacccgaaattagtaagaaatacgaatgtgtccatgtgcattgcggatgaattgctcggaagtcgtccaacaatcacccggcatcgatcagcaaccaaccgctcaataattatcgacaatcaccgtttcgtagctcacggttactcaacaatatcgggacctgtgcaatattttgccacgcactcccctaacccgccagaatcctacggttgcgtaaggtgacgagttcggtttgggcgattacaatttgaactttgagaagcgttcgcctcatggctggacgacactgaaaggtttacaggagcaagacttgtcggttatcaattccttcacgcagcacacgatcaatctcacccgtaaggcgctcaggttgggatccgacttcgtccacccggtccacgacgacaccccggacgagcccgattacctgtccaacgccgacgtgccggtcgaggccaatatcgctttgcctcacagcgacgattgggacgacggccacctgaccgtcaccgacatcgaccccgtcaccggcctgctcaccacctccaccgaaggcaatccgccgctggacgaaggtacgtccatctacgacctgtatgcggaccgcgccgaacgtatgggcgatgagccgctgtacacctacaagtccggcaacgattgggtgaccgtcaccgccaacgagttcctggctgacgtgcgtgccgtggccaagggcctgattcattacggcctgaagaagggcgatgccgtggcattcatgtgccgcacttcctacgactgggacctgaccgacgcggcgatcatggcctgcggcggtgtgctggccaccgtctacgacaccgattcggccgagcagattcgcaatatcgtcaacaactccgatgcccgactgctgatcgtgcaggacacggacatgcgtaagaaggcggatggggccgtcgaagagtgcccgtccctggagcacatcatcaccatcgagaccggtggcttggacgagatcaaggcctacggcaccacggtctcggacgaggagctggacgagcgcatcgattcggtcaagaagaccgacctgtgttccatcgtgtacacctccggttccacggccgcgccgaaaggcgtggagatgacccacgagcactactgccagaccgcgctgaatctgccggcctacatgcccgatctgctgcacgacaagaggaacaccatcctgctgttcctgccgcaggcccattccttcgcccgcgccatcaactacatcgtcgtctcctcgaacgtccgcatctacatcgccaccggcatcaagacgctgatcagcgatctgcaggtggccaagcccactctcatgatcgtggtgccgcgcgtgctggagaaggtgtacaacgccgcgtcccagaaggccggccacggccccaagggcgtggtgttcgcctccgccgtggtggccgcgcagaactatatgaaggaggtctccgccaatggcaaggcaggtgcactgacccgcactcgccgcgctgccttcgatccgattgtctactcttcgctgcgcgaagtgctcggcggtcgcgccaagtggattgtggccggcggtgccccgcttgacccggaactgctggctttcttccgtggcgcgggtgtgcctgtatacgagggctatggtctgaccgagaccaccgcaccgtgcgcgttcagcccgctgggtacgccgttccacgctggttccgtgggcatcgcattccccggattctccctgcgcatcgccgaggacggcgaaattcaggtcaagggtcgtgccgtgttcccgcgctatcacaagaacgacgaggccactgagctgtcgttcaccgaagatggctggtatgtcaccggcgacttgggccgtatcgacaacgatggcttcctgtacatcaccggtcgtaagaaggatctgattatcactgcaggtggtaagaacgtctcccccggcccgatcgaggaagtcattcagcgttgcgagttcgtctcccaggcactggtgctgggtgataagcgtccgttcatctccgcattggtgacgctggacgaggagtcgctgcgcccgtggctggccgccaagggcctggacgagaacatgccgctggaggatgccgccaagaacgccgccgtgcgcgccgaagtgcagaagtgggtcgatcaggccaacgagggcgtctcccgcgccgagtccgtgcgcaagttcatcatcctgcccgaggagttcactcaggaaaacggcctgatgaccgcttccatgaaggtgattcgtcccaaggtcatcaagcgctactccaccctcctcaacacccagatgtacacgaagcggaagtaaaccgtatagcaaaagctccctctgacgagggagcttttttcgtctataagccttagaagcccaggcgctccagctgcttggggtcggactgccagcctttggctaccttgacgtggaggtcgagcttggctttttggccgacgatgcggttgaccggggtgcgcagcttcttcttgacgtaggtgaggttcgaggcgcccttgccgatgatgatcggcttctgggagtcacgctccacgtaaatggacacgttgacctgcgccttgccgtcatagccctgaccggtctcgttgtcttccggatagtcgatggaatcaaccaccacggccagcgaatgcggcagctcgtcgtccagggtctcaaggaacgcaccgcgcacgagttcggcgatggtgtcttccggacgctcctcgctgatctgatcgtccgggtacatctgcggaccctcgggcgtgtgctcaatgagcacgttcttcacttcagccagattgtcgtgcttcagagcgctcaccggcacgatgtccgagaaatcggcgaaatcgttgatttcgatgagcttgttgatgagttgctgacggccaagctcgtcgatcttggtgacgatggcaatcagcgggatgcgccacttgaacgtaccgtcctcacgcttggtggcgaagtcggtacgcagtcgggagagaatacgcttgtcgccggggccgatttcttgatcggcgggcagcaggaaggccaccacgtccacatcggccagagattcgtcgaccacgtcgttcagacgctggccgagcaacgtacgcggacggtgaataccgggcgtgtccacgagcacgagctgcgcgtggtcggcggtcaggatgccgcggatcgccttacgggtggtttccgggcgagaggatgcgatggcgatctgcttgccgatcaacgcgttgatcaacgtggatttgccgacgttcgggcggccgaccacggccacgaatccggagcgatacggcacgtcctgcttggtcacgttcgccgtttcaccggtcgcgtcgacttcggcaacgccggcaacatcggaagcatcggtaacgtcaatgtcatcgacgtcgttcgtgctgttgttctgatcggtcatatcactccttgctggcggtatcatcgccttcgacgggctcgccgtcagtttcctcatgggtcttgttattttcctcgccgccctcgacgtgcgccggttctacgacgatggtggacaccttcttgcggcgtccggcggagtccacggcggtcagtcgcagaccgcgcgtcacagccgaggcaccgacaatcggcactcggcccagaatcttggtcagcaggccgtacacggtatcgacatcgtcctcatcaatgtcgatctcgaagatctcctccagatcggcaatcggcgtacgggcgggcatcttccacttgttgtctccgattttctccggctcagtacgctgggtgcggtcgtgctcgtcttccagctcgccgacgatctgttcgatggcatcctcgatagtcaccatgccggcgatgccgccgtactcatcgaccaccacggccacatgctggcgggaacgctgcatctcatggaacaggtcgtccaccggcttggattcgggaacaagcagcggctgccggacgatggattcgaccgcgcgctccatggccgccgggttgaaggcggtggcacgcacggcatccttcaaataggccacgccgatcaggtcatccacatcctcaccgatcaccggcacgcgggagaagccggagcgggagaacagtttcagcgcggaagacagtgtggagtcgcgctccatgcagatcatatcggtgcgcggcaccatgatctcgcgagtcaacgtatcagacagggtgagcacgttgcgcaacatttcggagacttccggatcgaagtcgttggactccaccagtcggtcgatggcggccttgccctgctcgagctgaatcttctcaagctcctcgtcgtcggacagatcggagtccttggagcggcggcccggtcccttggaaccggacttgtcgccaccgatgcgtgcgaacggcgtgagcttggtggccaacgacacgatgcgcgagttggaaatcatgatgccgaccggcttggccatgccggcggtgcgcgggcggaccagtacggagaccacggctacgataatcgcgaacaggaatccggagagcagttcaatccacagttccgcaccccacagggatgcgatggaagacaccagtacgccgtcgagcacattgcaggcgatgcggaagaacgcacagctgccggcggtggcgtaacggtcggcgatgagccgttgcacgcgatgaatcttgtcgatcttcttcatcttgaggaactggcttgcttcggagtcggtctgcacctcgaggatgagattgttaaggctggctcgcgttacgcgggccacggcgccttcagcggcggccatggtcagcgagagccagacgaacagggccgccacgagtacaagaatgacggtgatggcgatcggcgtggtactggaatactccataatgatttttcggtgtccttgaatgtccttgaacggtatcgaataatccggatttggtgtgattgatttgggagcttatttggaatcgaggtcgcggccagcaccgtgcgcggcgtcgtacagggccagcgcgtcgggtgtgccggcgggcagcgtggcctgcacgttggcatcgtggcgtagggcgaagaaggtgagcagcagctgtcgctgcaggccgaacatctggcgctcctgctcgggggtcacgtggtcgtagccgagcaggtgcaggatgccgtggatggtgagcaatagcatctcctgcatggtgctgtgcccggctgcggcagcctgttgggcagcgacccacgggcagatgacgatgtcgccgagcactccttccatcacggttttgccgtcgccggggcgcagctcgtccatcgggaagctcatcacgtcggtcgggccttcgaggttcatccaacgcatgtgcagttcggcgatgggatcgggatccacgaacatgatggtcaggtcggactgggtgctcacgcgcatctggtcgagtacccaaatacccaaatcggagaagaccttggggtcgatgacccactgggtttcattggtgacgtcaacgctcatcgtctgtctcgctttggttggttgaatccgcttgctggcgggcatcgaagtcggtatggttgcggcggcccttgcgttcgatgtcgcggtggtcgccggcgatggcggagtgacggtcgtaggcggccacaatctgtccgaccagctggtgacgtaccacgtcctcggttttgagatgcacgaatgcgatgtcgttgatgccgcccaggatgcgttcgatggtggccagtcccgagcgaggcacggtcaggtccacctgcgagatatcgccggtgatgaccatcgtggtgttgaagcccagacgggtcaggaacatcttcatctgctgttcggtggtgttctgagcctcgtcgaggatcacgaacgcgtcgttcagcgtacggccgcgcatgtaggcgagcggcgccacttcgatggagccgtcgtccatgtaccgcttgagctggtcggcgccgagcatgtcgccaagcgcgtcgtacagcgggcgcagatacgggtcaaccttgtcattcagcgtgccgggcagaaagccgaggctttcgccggcctccacggccgggcgcgtgaggatgatgcggcgaatctgcttgtcctggaaggcacgcacagccttggccacggccagatacgtcttgccggtgcctgcggggccaatgccgaaggtgatggtgtgcgattcgatggcgttcacgtaggccacttgtccggcggttttcgcacggaccggcacgccggcagcaaaggtgatgacgccgggaaccgtgggcttgcggtacgtcgggtcgtgggagccggcagaacgtgcatgggcgcgttcgtttgaggtcgattgcgccagtttgtcacgcaccgggccgtgaccgggatgttcgaggcgcacgtggttcttgagcacgttctggtcgagcatgcgacgcacggtgtcggcgtccataggcgcggtgtaggcggcttggatgatggtattgaccaaatcctcggcctgtgcggcctgggcttcggtctgcttggagcgggagacgatcgccacgcggttgccgcgcacgataatcgtcaggtccggaaaggcgcgctctacctcgcgaatgacctcgtcaaccgggccgagcacggcgacggggtcaagttggggcgggatggtgatggtacgtgtagtcgttgccacgaagcggatattcccctactactcgtcgagcttttcgccggtcatcacgtgcgcgtgcacgtggaagacggtctggccggcgtcgagaccggtgttgaacaccagtcggtaggcgccgtgaaattccttgtcggcgatgttctgcgcaatggagacgatgtgggccagctcggtcgggtcgtcggcggcaagttcggcgacgttggcgtagtgcttcttgggcaccacgagcacgtggaccttggccttgggattgatgtcgttgaatgcgtaggtcgtctcgtcctcgtagaccttgctgctgggaatctgccctgcgatgatcttgcagaacaggcaatcgtcggattcgctcatcatgctccttggtttgatgttgctacgcaccagcttagcgcgtgggcgttactcgtaacgtcccaacacccgagacaacagcgacaacgctacaggaccggccgtcgcggctctcagaatattgcgccccagtacgcagctcaccgctccggccttgacgaaatcagctacctcctgctcactgatgccgccctcaggcccgaccaccacactgacagtccgcggccggccgtcctggagcgtgcgttccaccaactgcgcaaccttctcctccacgccggaccacgtatcggtagcatcctgatgcagcacaatcaccacatcgccatgcacgcaggccctgcggcagatggccacgacctccttgctggacgcgcacgcctccagttgcggcttaaaggcgcgccgcgactgctcggtggcggcatccagtaccgaattccacttcttgtctgtacggccgaccttccacttggcaatggatcggtccgcctgccatggcaccacttggtcgacgccaatctgagtagccatatcgatggcctgctcatcatggccggttttcgccaatgcctgaatcagcgccaaacgggtgagcggctcgggttcgcgccccacttccacgacttcagccagtccggcttcaggatcggccatcactgcctggattctcaagccgttgccgtcggaaagttgcaggctgtcccctgccttgagtcgcatggcctgcacggcatggcgcttgatgtgagcgggcagggttagcttccagccggcgtggagttcgtcgctgttcaccgggacgtcgtcgacctgcgggtcgaaaagaaaaagggcatcagtcatgacttcaaggctacacgcgacacgccgggcacacgcgcgaattgcatccctgtaatttcatgctaagctatctactcgttgtccaaacgacacctgcccgggtggcggaatggtagacgcgctagcttgaggtgctagtgcctattttatacaggcgtacgggttcaagtcccgtctcgggcacagataaaccccttgcattgcaaggggtttttcgttatctgcacacacgaaaggccaccaatgcagttcatcacgctggacaccgtcgacgacccgcgcgtcgaagcgtatgtgagcctcaccgaaatgcagttgcgtaatcgcttggaaccagccaagggcgtgttcatcgccgagtcccccaaggttatcgaccgcgcgctggccgctgaccgcgaaccgctgtcactgctggtcgaggaaccttggctggagggcatgaaagacaccttcgacttcatcgacgggcgctggggcgcggatattcccgtctacgtggcctcacctgagcagctcaagcgtctgaccggctaccgtttgcatcgcggcgccctatgcgcgatgcgacgctggccgttgccctccgtagccgaggtctgcaagagcgcccgccgcgtggcagtaatggaaaacatcgtggaccacaccaatgtgggcgcactgatgcgttcggcggccgcgctcgatgtggatgccgtgctggtcacaccctcctgcggtgatccgctgtaccgacgcgccgcccgcgtgtcgatgggcaccgtattccagattccgtggacccgtatcaccgggttcaacgacgacggcaccgaaaacaagcattactggccgttccagggcatcgacgagttgaagtcgctgggcttcaccaccgtggccatggcattggaggatcgttcgatttcgttggacgaactgacacgccgtctgcacgcgcctgccgaagatccgacgcatatcgacaagctcgcgctgatcttcggtaccgagggcgacggcctgtcccaccatacgattgcccgcgccgatttgaccgtgaagattccgatgagccacggcgtggatagcctgaacgtggcggcatccagcgcagtggcgttctacgcgacacgctaaggaatcgcacgcgctccgaaaaggccggatccttaacaaatctacgaaactgttcatcgcaagttcacggcacgcgggggcgaaagccttgcatgttcgtttttttctgcaattattaactatgtaaaccgaatgcaaggaagcatccggcccggcagtgcggtgtcgaaagacgctcagtaacagagaggacagttacgatgaccaagaatcccaagattctgtcgattgtgcttgcaggtggtgaggggacccgcctgatgccgttaacccgtgatcgcgcgaagcccgccgttcccttcggtggtgtgtatcgtctgatcgatttcccgttgagcaacctggtgaactccgggtaccgtcaggtcgtggtgctcacccagtacaagtctcactcgcttgaccgccacatctcccaggtctggcgtttctccccgctgcttggctcgtacgtctcccctgtgcccgcgcagcagcgtctcggcaagcactggtatctcggctccgccgacgccatctaccagaccatcaacatcatcgaggatgtccagccggacatcgtggtgatcgtgggtgccgatcacgtctaccgcatggacttcgaacagatggtacagcagcacatcgagtccggcgccgagttcaccgtggccggtatccgccagcccatcgaggaatcgaaccagttcggtgtgattgaggtcgatcccgatcacccgaacatgatcaagaacttccaggagaagccgcccaccaccaccggtctgccggacaatccgaaccagattctggcctccatgggtaactacgtcgccaacaccaaggccctgttcgaggctctggctctcgatgagaaggctgccgacaccaagcacgacatgggcggcgacatcgccccgtacttcgcttcccgcaacgaagccggcgtctacgacttcaactcgaacgagattccgggctccacggccactgatcacgcttactggcgcgacgtcggtacgattaagcagttctacgatgcgcacatggatctgatcgcctatgtgcccgagttcaacctgtacaaccaggattggccgatttacacgatgtccggcaacctgccgccggccaagttcgtgcacgccggccgcgaccgtctgggccacgccaccgattcgatcgtctcccccggtgtgatcgtctccggcggtgaagtgcaccactccgtgctctcccccaatgtgcgtatccactcgtgggcacagattgtcgattccgtgctgttcgacggtgtagtcatcaaccgccgcgcccgcgtgtacaaggcgattcttgacaagaacgtggtgctcaccgagaactccactgtcggcatcgataccgagcacgatctggcccgtggcttcaccgtcacgccggatggcatcacggttgtcccgaagaacaccatcgtcgatgactgattgaccagtccagacatggaaaagccccgcatcatgcggggcttttctcgtatagagctccctctgatgagggaacttactaagcgctatcagtactttggcatattgtcgaagctgaagcctagggcggcgagctggtcgcggccttcgggcgtgatgcgctccatggtccagcgcggatcccacgtccagtcgatgcggaactcctcgaccagaccggccagcgtggatgcgcattcgtcctcgataaggtcggtcagcgggcaggccggcgtggtcagcgtcatcgtaataatggcgcggcctagctcatcgatctcaatgccgtagaccagacccaaatcgatcacgtcgatgccaagctccggatcaatcacctgatgcagtgcctcgcgcacgtcttcggcagtggcgcggccgatatcgtcaatcgccttgatcggaatctcgctgccatcggactgttcgtcatcctggcaaccgcatttgccgtggtgaccgccacacgcacaggtgtcatcgccggacgcagcagagtgctcgatcgggcgtccgttcgggaagcccttggccaaggccgggttggccatcacgcggcgagcggcctcctcgtcctgcaggacgccgttgacagcatcgaaaacggacggctgtggttcgggaaccaaattatcgttggacatatttcctcagttctttgcagcgagggctttggcgatggagtccttcagcccttcccagcctagcagagcgcatttgatgcgcatagggtatttcgacacgccttggaataccacggcgtcgccgagcttttcttccaggttctcgtcgtccagaccggcaccgcgcgattccatcagcttgtggaatgtctgttccagatccatggcctcgtcaacggttttgccgtccaccagatcgaccatcaccgacaggctggcctgcgaaatggagcagccgtggccgtcccacaccaatcgcttgatggtgtgcggttcgtcatcggagacttcgacatggatggtcgcctcgtcgccgcaggtcgggttgaactggtgcgattcaccgggcgtgcagtattcgtggctggcttgtacggtgacattggccgctgcgtccgcggactgttcgaccgctgcgttgggcgcaaaggattccttgccatgcggatgtttcgacgcctcgaggatgacctcttggtacatctgttcgaggtcatccccgctcataccgaattcgttcatggtgttctgttttactccactccaaagaacttacggatgcccttggccgcttcgaccaacgcttgggcatcttcgaccgaattgtagacaccggaggaggcacggttggatgcgtataggccgaagtggcggtgtaccggctgggcgcagtggtgtcccacgcgaatcgcgatgccctgggcgtcgatgaactggcccacatcgtgcggatgcacgccggccacgtcgaacgccacggtgccgatgcggtccacgttttcgcgcggcccgaggatgcgaatgccatcgacgtcgccgagcttgagcagttcggcggcgatggtcttctcatgggcttcgatgttctcgagcccgatgttcatcatccattcggcggcgacgcctgcggccaccacttgggcgaccggctgggtgccggcctcgaagcgggccggaggggccatgtattgggcctcgtggtccatgtaggcgagctcgaccatggagccgccgaagttggccggcggcagggcttcgagcaggtcgcgcttaccgtacaggaaaccgacgccggtaggaccgtacatcttgtgcgcgctccaggcggcgaagtccacatcaagcgcgtggaaatcgaccttgaggtgcggtacggactggcaagcgtccaagatgaagatcgaacctacttcatgcgcacgcttgatgatcggggcgatgttggtgatggcacccgtggcgttgcccacgtgggtgacggccacgaccttggtacgctcggtgatgacttcgtcgaggttgtccgtacgcacacggccgtcctcggtcaggtcgatccacttgaaggtggcgccggtacggtaggacagctcctggaacggcagcagcaccgaatgatgttccgcacgcgagacgacgatctcatcgcccggcttcagggcaaaacgcttggcggcttctcccccacgccccagcgatgcattgccgaatgcggtggcgagcaggttcagtccggccgtggcaccaccggtgacgacgacctcctcttcaccttcggccgcattcgcgccgaccagcttggccaccttggctcgggcctcctcaaaggccatggtgctacgggcggccagctcgtgcgcaccacggtgcacgccggcgttaattgtacggtagaagttcgcctcggcgtcgatcaccgcattcggcttctgcgaggtggccgcagaatccaggtacacgagcgggtgcccgtgaatctcctgatccagaatcgggaactgcgcccgaatcgccttaaaatcaaccattatgttccccctacttacgtaacaattgtacgaaacgagtgggagtctgacatggcctgttcgcgaccgtaaagacctggcctaagcggcccggagcgtgtcgagaatagggcatgtcagactcccacggtcacggactcaggccagtgcggactcggagtcggcgccttcgggcaggtactggtcgtagccgttctcttcgagttcgtcggccagctcagggccgccggtcttgacgaagtggccgtcggcgaacacgtgcacgatgtccggcttgatgtacttcaagatacgggtgtagtgcgtgaccatgaggatgccgaactggttggcttccttggcgcggttcacgccttcggacacgatgcgcagggcgtccacgtccaagccggagtcggtttcgtcaaggacggcaaacttcggtttcagcagttcgagctgcagcacttcggcgcgcttcttttcaccgccggagaagccttcgttcacggaacgggaggcgaacttcgggtccatcttgaggcgcttcatggctgcggacaggtccttggcccactggcgaataccgggagcctcgccgtcgatttcggtcttggcggtgcgcaagaagttggtcatggacacgcccggtatttcgaccgggtactgcatggccaggaacaggccggccttggcgcgctcgtccggagtcatcttgaggatgtccttgccgtcgaggagggcctcgccggagtcgaccacgtacttggggtggccggccaacgtgtaggcgagagtggacttgccggaaccgttggggcccatgatggcgtgggtttcgccggagtggacggtcagggtggcacccttcaggatcggcttgatgccttccttggtttcgacgtggacgtgcaggtccttgatttcgagtgttgacattgttgtgctcctaaaaatgctgttcttacttgtcttcgaggacctgtgccatggcgtcgttttcaccacgggccagtcggcggtcaatcacggtcatcagatgttcggagatggcgggaatgccgatctcctcgacgagttcgccgaagaagccgcgcaccacgagcttgcgggcgtcggtttcggggatgccgcgggattcgaggtagaacagttcctcgtcgtcgaagcggcccaccgaagaggcgtgaccggcaccgatgatgttgccgttttcgatttcgaggttcggctcggaatcggcgatggcgcccggggtcaggaccaggttgcggttgagctcgtaggagtcggtgccgggggcggtgggctggatgagcgcgttgcccacccaagtggagtgcgcgcccttgccgtcaagcgcgcccttgtagaccacgcgggacttgcagtcggggtggttgtgtaccaccatcgtgcggtgttcgatgtgctcgccggggtccacgaagtagatgccgagcatgttgaggtcgccctgttcgccgccgaagtcctgatccatgcggatgcggacgatgtcgccgcccaaggtcacgacggagtggcgcagggatgcgccttcgccgacgtggatgcggtggttggccacatgcttggcggttttggcccattcctgaacgaacgtggtggagacgtgcgagtccttgccggtggtgatttccacgccttcggccagtcgtgcgtcaccgtcgtgttccacgacgacgtccgcatgagccttgtcggcggcggcgatcaccagatggaaagcgtcgaggtcctcccccgcgccgtgcaccttgacgagcacgggctgggcgatctcaccggacagttccagaatggttgcggtgcggccggattcccattcgactgcggagacgcggtcgttgggcttggacacagtgccggacaggccctcaccgagcttgatctggctgagcttcacgccttcggccaacggcgagccgtcaatcatggagacttcgatctgcgtttcgccggaaggcttgaacacggtgaagaactcgttgatgcgctcgataggcgtgtagcgccattcgtcctgcttgcggctgggctccgggtagtcgcctgcgttgaacgagcgcacggcatggtccacggaggacggcatagcggccggaatcgcgtacgggtcgttggggtcggcgaccggaatcttgatttccttgacgggtgttgtgttgtcggtcatcggaatcagcccaccgatccttccatctgaagttccacaagtctgttgagttcaagcgcgtattccatcggcagctcacggctgatcggttcgacgaagccgcgcacgatcatgcctcgcgcctcttcctccgtgagacctcggctcatcaggtagaagagctggtcttcggaaatcttggaaacggtggcttcgtgggccatcgaaacgtcgtcttcgcgaacgtcgacatgcgggtaggtatcggagcgggagaagtcgtcgaccagcagggcatcgcacacggtcgagttggacgaaccgtacgcgcccttgacgattttgaccagaccgcggtaggcggagcggccaccaccacgggaaatggacttggcgacgatggtggagctggtgtgcggggcgaggtgaatcatcttcgcgcccgtgtcctggtactggcccttgccggcgaagccgagggacatggtggatgccttggcgtacggttcggcgaggatgcaggccgggtacttcatggtggccttggaaccgatgttgccgtcgacccattccatcgtgccgccctcgcgcacgtaggcacgctgggtgacgaggttgtagacgttgttcgaccagttctgcacggtggtgtaacgcacgcgggcgtgcttttcgacgatgatctcgacgatggcggcgtgcagcgagtcctcggaccagatcggggcggtgcagccttccacgtagtgcacgtaggagccttcgtccgcgatgatgagcgtgcgctcgaactgacccatggccggggtgttgatgcggaagtacgcctgcaacgggatgtccacatgcacgcccttcggcacgtatacgaacgagccgccggaccatgccgcggtgttgagggcaccgaacttgttgtcttccggaggcacgacggtgccgaagtacttcttgacgagttcagggtattcgcgcacagcggtgtccgtgtcgacgaagatgacgccctgcttcttcaggtcctcctggatggagttgtagatgacctccgactcgtactgggcggccacgccggagacgaggcggttcttctccgcctccgggatgccgagacggtcgtaggtgttgcggatgtcgtcaggcagttcgtcccagcttttcgcctgcttgtcgattggcttgacgtagtacttgaagtcgtctgcgttgaagccggagagatccacaccccaatcgggcatgggcttttcgaggaacgccttgaatccacgcagacgcatgtcgagcatccactgcggctcgcctttgtcggcgctgatcgcgcgtacgacgttctcatcaatgcctcgttttgcggcttcgccggcggcatcagaatcatgccaaccatagttgtagtcgccgaactggctgatgatctcgtcatccttcttgatcttgtcctcgttgacgcgggtacgatcagccacatactggctcatctccacgtcagcggcggcgtttggtgctgtgttttcggtcaccatcctgccttccttgtatcacacttaatcctatgaaaacctagcagaacccaagtgcaaacactagctgccctgacgcatattggctgtgggcttgattacacgaatgcgatacagcgatattggagccgggcaagcttgtcccatgcacaccgaacatcgcgtatgcggcattatgtgtcgcaccactgcatgccgtatttgttacatatcacactgttgcatatcacacttggatatgcacgctcgtgcccatattgcaccagttgtagaaccattcggcgacatcccatccgatacccacgcaaccatgagatccgttggcaatggagggcattacggcatccgctacatatccgccggcaatacggtggattgcgcaaccggaggagaagtaattaacgaagcccacgtctttgacatcccatgtttccaccgtgccatcggcaagattcagcgtgccgctcatatcttgactgggcaacttttgccatacgttgaagtcacctgtcggcgtacacatcatgccaacgcattcgccggtgacgttgtcgttgccctccgcgaccacgacattcaatgtcttgaccaccgtgtcattctcataggcatagagcttacggtcggacaggtcaatcgccacgcgatgagtgaccttgacttcctgtttgggatctaccttgccgtccacattcactgagccagttcccgtggccagcacctgagccaagcgagcaccaacctccgtatccgcgccatcggcaatcacaatgccatcatggccttctgtttcagtgctcagcacctcgccagcattattgacgacgaccttcttgtcttcacgttccaatttgagattcggcttgatttgctcgtcatagtattgctgcagcttatcggcatcaaagaccacgtagccattacgtacttcattgtctttcagctttgactgctggttggcgtcgatgcgcatggccgaacccagcatggacgcattcacggtggcgatgtctttatccgccaccttgatggccacggcattgttcactagggtttccagcgtggttttcgcctcatcggcaattgcattggtaatcgtcggttcggttacgtcgagttccacccgaacggtctgtggctggacactgcccaatgactccactgtggaaatggcttgcttcgcaatgctggtggcgttggctccctggccattttctcccgcaataacgttgaagccactgttgttatcgttcaatgcgacttgcgcgtcaacaggttcttgtgcatcaatgttcagcgccttatctaccacactgccatcagcgagctcgggattgatttgcggggccacatcatgcgtaatccagaacgcatactgttgccaccatgcgtcaccgcgttgggcattgatgacatcggatgcgattgcttcaccatcaacttcgatgccgagatctttcagcgtgaacgtcgccgactgcccctggtatttcgctcgtaccgcggtgttgtcgacctggtcgttgattaggtcgacaatctcctgctcggttttgccggtaactgaatttccccatagcgttgtgccaggcagcacgtgatcttggaagaaccaaacaccgccgccacaggcagcccccaaggcaaccagcagacaagcaatcaccacccacggccagatgcggcgcctcctcatctcatcgccctgaatggaatctgatgcagcagcatccacactgtctgccacagtgccgctgacggcattattcgcaccaaacagaggcgcaaactgctgggtcgagtcatcaaggtgttcggtcatggtcggtctttctgcgatggcctactaagcgttatctgcatactaccaacacaccatagaaacggtaattttttaccgtcgccttccaatacatcatgctgcatgctgctcatacaacaaaaaagacgtggtggcgaaacatcattagatatttcgccaccacgtctttaccgtatgtcttgcactacgccgatgacggcagccagcacatcatgccgcgatattatgcacggcacgaaagtgcgtcagcgcgccgcctgatggtcgagcgcggccttgaccaggccggcgaacagcgggtgcggcttggtcgggcgagacttgaactccgggtgagcctgggtggccacatagaacgggtgcacgtcctgcggcagttccacgaactcggtgagctcgccgtccgggctctggccggagatgcgcaggccgccttcgcgcagacgatccttgtaggccacgttgacttcgtaacggtggcggtgacgctcggtgacatgcgtggtgccgtacagttcggcgaccagcgagccttcctccagctcagccgggtaggagccaagacgcatggtgtggcccatgtcgcccttgccggccacgatgtccttctgctcttccatggtggcgatcaccgggttggcgcaatcgggctcgaactcggaagagttcgcgtcttcaatgcccagcacgtggcgggagtattcgatgaccatggactgcaggcccaggcacaggccgagggcaggcagcttggtttcacgggcgaacttcagagcgccgatcttgccgtcgatgccgcggatgccgaagccgccggggatcacgatgccgtcgacgttgtcgagagcggcggccgcaccttcggtggtttcgcaacgatcggccgcaacccacttgacgttgaccttggcccagttggcaaagccgccggccttgatggcctcggtgacagacaggtaggcgtccggcagatcgatgtacttgccgacgatggcgatgttgacctcgtgcttggggtggtgcacacgctccagcaggtcggcccattcgtcccaatcgacgtcatggaacggcaggccgagctcacgcaccacataggcgtcgaggccctcctcgaacaggatcttcggcacatcgtagatgctcggcgcatccacgcagttgaccacgccttcggcatcgacatcgcacatcagggagatcttgtccttgatggactgattgagcgggcggtcggagcgcagcacaagggcgtccggggaaatgccgagctggcgcagcatcatcacggagtgctgggtgggcttggtcttgagctcgtgggcggcggaaatgtacggcaccagggaaacgtgcacgaacatgcagttgtccgggccgagatcgcggcgcacttcgcgggcggcctcaaggaagggctgggactcgatgtcgccgacggtaccaccgatttcggtgatgatcacatccacgtcatcggaagcctgggcgcgcatacgagacttgatttcgttggtgatgtgcgggataacctgcacgcactggccgaggtattcgccggcgcgctccttgcgcagcacttcctgatagatctgaccggtggtgacgttggccttctggctcaggaagacgtcgaggaaacgctcgtagtggccgatgtcgagatcggtttcggcaccgtcttcggtcacgtagacctcaccatgctggaacgggttcatggtgcccgggtcgacgttgatgtacggatcgagcttttgctgcagaacatggataccgcggctgcgcagcaaacgaccgagcgaagatgcggtcaggcccttgccgagagaggagacaacgccgccagtgacgaaaatatgcttggtgacgtgttcttgagaattaccatgtgttcttctaaccatggaatttcactctatcatccgtgtatgacccggcgtgttcaccagacgcgtcggccccgacatggcgtacttgaacaatacgaatagtaggctcgtcaaaaagcatacgcaaggtcataatcacgtcaaacgtcttatccgccagctattgcaggtattggtcgagacgcactaggcctaacgcatataggacaaacgctgttttcaggtttttcagcgaggcccattcatcggcaccgtgcgcgttgccggcacctggtgcgatgaatggcggggtctccaggtcgatgccgtcgaccgccggcacatggtcggcatggaattcgggaccgaagttgagtgcgcgcgggataaagcgggcgtgggtgccgtcgccgacagccacgggtcgagcctcgcaaccgagcacgtcgttgtaggttgcggtgagcaactggacacgcgggtcgtcagcctgcacgtagtatgggtcatcgttaaggatgtcgacaatgcggccgcccgccgcttcggcttgtgcttgaatacgctcgatgatttgttcgtgtgcctggcctaccgcataacggatgtcgaagtgcaatacgatggcatcttcagaagtctcacccgataccgcgcctaataccttgtctgcttcagcgaactcattcgccggtataatcaaaccaccattggcggtagtcggtccgctttccgcattctcgcaatcgatacccaagccggtgccatatgagtcttttgtccattgggcaatcgcctgcgctgcagtgaggtcacggccttcgagcagaccggaccgggcaagcgccgtagtgagcaccgctatagcgtttacggtaccggacggctggcaggcatgaccggcgacaccggtggcctcaatcgtgacgccttgcgctgttgcgttgatatgcaatcgctcggcgatatctggagcgatgttgccgctctggcagaatgcttgccgcacggtagattcgtcgacgccggtgagggtgattgcggcggccccgggaaccgtgttagtggcggtgccggcatgccaaccgcgcaattgcggcccgaccggcagttcgacatccacatcgagcagccctttttggatattgttcaccgggaagggaccatcggtgacgatggcctggtacggcgcgccgatgttggcgacgaaccatttgatgtcgttgagcgcgatctcttcggagccgccgaacagtatacgtacgcggtggcggaaacggtggtcgtgttccttgaagaaacggagtaggaaatagctggtcagcgcgacgcctttattgtccaatgagccgcgaccgataacaatatcgccaataacctgcggatcgaaggcatcgtgcgtccaaccgtcgtcggcggggactacgtcgaggtggtcgacgaaggcgatgtcacggtcggtctccacgttctcctgtggataaacgacttccatgacgtggccggtgtagtcgcgcgtaggcagcccgtctcgtcctgccttggccagcatatggtcgaatacacggcgtacttcgggtccataaggcgcgcccggacgaggattcgggtccgattcgtcggaacaggaatcccgggctcaacgtcgactgctacccgggattggctggagggcttggttctattcgctcagcaagtgcgccacagcatcgagcgcgagcttgtagccgtagaaacccatgccggtgatggtgccggtggccacagggctgattacggaacgcttgcggaactcgtcgcgggcggacgggttggaaatatggacttccataagcggcaggttctcgtcaatgaccatgtgcgcggcgtcggcgagagcatacgaatagtgcgtgaaggcggcggggttcatgaccaccggggttttctcgtcggcggcttggtgcatccagtgcaccatttcggcttcgtcgtcggtctggcgcacctcgacttcgaggccgaggtccttgccccattcggtgcagagcttgcgcagggtgtcgaggtcttgacgaccgtagacgtcgggctggcggacgccgagacgtccgaggttagggccattgacaacgatgactttggtcattgggactccttttgtttgtgcttctctccctccgccccttcggggcacctccctcatcagagggaggtagaaggtaaatccgactccggggtacctccgttagaggggagccaagtacttttttctgaggggatggcgaacggcacggcctacggccgttcaattactgctggatacgacggaatgcttcttccacggcttcggcgggcgggttgtcgaggtgtacgacgtgaccaatctcgtcgaggaccacgaagcgcagctcattgccgcgggccttcttgtcgcgatgcatcaatgcgagcacgtcgtcgaacgagccgccattccacgacgtcggcagacccatcgaagcaagcaacgagcggtgatagtcaaccagatcctgatcgatgtaaccgatcagatgggccagctcggcggcatacaccataccgacggccaccgcattgccatgcctccagcggaaatgctcgagcttttcgatggcatggcccatcgtgtgcccgtagttgaggaattcacgcagacccttctccttcaaatcggaggagacgtggtaggccttgacctttaccgtgcgctcaatgagctcggcaaccacgtcttcgagcggcgagccgaggaatgtagagccgtcgaaagcgcgcagttcagctgcgtggtcttcgaggatatgcaggatttcggggtcgcggatgaaaccggatttggcgacttcgccgagaccctcgatgaagatgtcattgggcagcgtagccagcgtcttggtgtcggccagcacaccggcaggcgtgtagaacgagccgacgaggttcttgccctgcggggtgttgatgccggttttgccaccggtggaggcatcgaccatggccagcagcgaggtcgggcagtttacatagcgcacgccgcgcatccacgtggcagccacgaaaccggccaaatcggttgcggcaccgccgccaagccccaccacggcatcggatcgggtgaaaccttcgttgccaaggcgttcccaaatgccgttggccacggtaatggtcttgccgggttcggcatccggaatcacgatgtcggaaacctcatagccgccctgacgcaacagggcgcgggcacgatcggagtgtcgctgcaccggctgagtgtggataagcgcgattttggcgggtttgggtcccagcacgtcgaccagatggttcatggcaccttcgccaatgaccacatcatacggctcaattgccgctccggtaacatgcactgctcgctcagataccatatcaatcactttcttcgctgcgccctgaggcgtaagcccccgggtatggacatgaacgttggcgacctcgcggaatactgggtcacgctgcttgaacagttttttccaacgggagttggcgttgccattgagcatgggccggcctcccccacggttcgcgcgttccatggcttccgccggatcggcatcaaggtagaccacacgaccgccatggtcgatgtaggaggcgagggcatgctgggtggatggcgtcatgggagcgccaccgcccagcgaaaagataccgtcgaaatcctcaagcatatcggcgatgagatcggcctcgacctcgcggaatgccggctcaccgtattcctcgaagtaggagggaatcttcatgcccacttcacgttcgatctccacatcggcatcggcgaacggcagacgcaacatatgcgccacttccttaccgacacgtgttttgccggctcccatcatgccgatgatgacggcgcgggggcgtgcggtcataatctacgaatcctctcgacgattggtgagtacagttgctgatggttccgcggcagtcgtcacgaaaccatacgcccttcgttcagcgcatgtgctccggccacgaggcgagatacgactcaaggttgcgccgtgtttcggcaacactgtctccaccgaacttatccagcgcgtacttcgccaaagtcagacgcaccatggcctcggccaccacggatgccgcaggcacggcggtgctgtcggaacgctggttgatggcttgtgcggattcgccggtcagcacgtcgaccgtacgcagggccttggggatggacggaatcggcttcatggcaccgcgtacgcgaatcacctggccattggacataccgccttcaatgccgcctgcgcggttggacagacggtcgatgcggccgtcggcgttgaccacgatctcatcgtgcgcctgcgaaccggggcgggaggcttccaggaagccgtcgccgatctccacacccttgaacgcctgaatgcccatgatcgcggaggccagagccgcgtccagtcggcggtcggactccacatacgtgccgatgccggcaggcacaccgtaagccagcacttcaatcacgccgcccaacgtatcggaggccttcttggcctcgttgatgcgttcgatgatgcgggcttcggcctctttgtccagcgtacggacaggcgaggcatcaagcgcttccagatcgtcgggggtgggcagaggcaggtcggggttggtctgcacgccaccaagcgccaccacgtgggctacggtgcggatgccgaacgcctgatccaagaactgcttggccacctcgcccaaagccacacgggaggcggtctcacgggcgctggagcgctccagtaccgggcgggcgtcgtcaaaaccatacttgcgcatgccggtcagatcggcgtggcccgggcgcgggcggctcagcggcgcattgcggccttcgcgcggcaggtcatggtcgagtgcatcggcgctcatgacctcggtccacttcggccattcggtgttggcgatttcgatggccaccggcgagccgagggtcaggccgtggcgtacaccggtcagcagacggaccttgtcttgctcgaacttcatgcgggcaccgcgaccatatccaagtcgacggcgtgccagtgcggaaacgatatcgtccgtgctaatacgcacgccggccggcaacccttcaatcatggccaccaatgcttctccgtgagactcccctgccgtctgccaacgcagcataacttccctcgtttcatgtgtgtacgtctatgtgtacgtctagctaggggttaatgttaagccatgccatacctgttcacgctacccggtctgctatgtgggcttgcactgtccattgaggatgttcgtcatcggcgggtgccgatcgcgtgggtggctgcgggcgcgttgcttcagctggccgccgatttcgcgtatggagtggtggtgaacgacctgttcgtgctgttgcaggcgctgttgttcaccgtgctatgttgcctgatccagttcgcgttggcgttgctggtgcctcggtcattgggattcggcgatgtgaccgccttgatacctatgggattgtctgtcggactgtttggcctgttgcctgtggtggtctggtggctggcgatgggcgttgccggcatcacatggattgccttgtggacgcgattcgacccacaacgcacatcaccggcacatgcgggcaaggtgccgtatgtgccggtgatattggcgggcgcgattgtggcggtggctgttggggtgttgtcctagatttcttccatccgcttcgcgggagccccgggcttaagttgagcgttacattccctgcagtgctcccctcagtccgcttttttgcggacagctcccctcggcgagggagccaatgaagagaccaacgtccgatcagcttccccaagcgaaggaagctaacgggatgactactggttttcggcttgccacttgcgtagttcggccacgttctggtcatgttcatcggcggttgcggcgaacttggtttcgccggtgtccagattgaccgtgcagaagtacagccaattgccgccttcggggtgcagtgccgcttgaatggcgttatcgccgggattgctgatcggcgtaggcggcaggccggagatcttgtacgtgttgtacgggttggactcgtcttgggtcatctcggtggtcacctgcgcgggcttgacgttattgccataggccacggtggaatccatgcccaacgacatgccctgctccaaacggttctcgatgactcgcgtcactttgccgtagtaatcggctttgttgacctcggcctcggcgatagaggcgatgatcatcacccgttcgcggtcactgccggccggcacgcccaattcatccaacttggcgatacgcttatcgaccatggccttgaggatttccgaagcgctcttcatgctcttgacgttgtaggttcccggctccagccatccctcaaagctaccgcccgcttcattgggcagaatatccttacccttgttcttgataatcgtgtcgaattcgctttgggcaatgccggaaagcttcgcggcgttggcgaacacatcggtggcacgttcaccgggacgaacctcgaggaagcccgccgcctggttggtgtcggagagaacgtcgatcactttggatgcggccatatgcttcttcaatgtgaacgttcccggatagagtgtcgtgctattggcgttgaccacgctggtgaacgcggcagtagacttgatgacttcggccttgagcagattatcggcgatctccgccgcgccttggccctcgctcacggtgaattcgacctcgccatagcccggtcccggatagtccgcgatggccgtcgactggttgctccggctgtcgcgccatgcgatgagcttggttacgccgaaatagccgccgccgataagcagggcgacgatggcgatagcgatgataatgccactgatacgcttgcgcctgcgctgtgcacgtcgcttgcgcatctccctgcgggatttcggcggttctggcggctcggccccgcgcattggttctgacccctgttcgacccaatgcgtgttgtcatcaaagaactcgttaaaatcatcggtcataaccgatacctcactgctcccgggtacggtcgagtgccgtctgcaaaatcaccactgccgactgctggtcaaccaccggcctgtgcttgttcgaagctttatgggcctcgaacagctgacgatgcgcactgactgttgtcaatctctcatctatcaatgatacctgcggaatctgatactccgtagaatcactgtcttcactctctgcttgcagcctcttctccagattggccgcccacctgcgcgcttttttggcgcttttgccttctgtaccgtccatctgcaggggcagtccgacgattacatggtccacatgttcgtcttcgatgacgttcaggacctcgtcaatagcaaagaaatagtcgccggcaacatgaatgttgccagcaggatgtgcaaaggtaagctccgggtcggacagtgccagtccgacccgggcattacccaaatcaacgcctaaccacaccactggcggaatcaggctttctgcgcctcgtgcttgagcgcttcgagggcctcgtcgatcttggaggcatcgacaccgccaccctgggcgaagtccggcttgccgccgccaccgccgccgaggaccttggctgcgccacgcaccagatcaccggccttgatgccggccttgcgggcggcctcgttggtggccacggcgaccatcggcttgtcatcctcgttcacgccggcaagggccaccaccacgggggcgtcttcaccgagctgggcgcgcacgtcgagtacggtcttgcgcagggcatcgaccgcgccaaagtggcccacgttcttgacggccaccttgaccggggccgcggagttcttggtgtcagcaaccagcgccggaaccgaggcggccagctgggactcgtacatggaggccaagcgacgatcggattccttgagcttggcgagcagggcgttcacacgctcggcgagctcgtccggacgagcgttgagcttgtcggacagctgggagaccagcgcgtgctcacgagcgttgaagtcataggcaccctggcccacgacggcgtcgacacgacgcacgccggagccgatggaggcttcggacaggatgttgaccatgccgatcttgccaacgtggtccacgtgggtaccaccacacagctcgcggctccagccgtcttcgccgatggagaccacgcgtacgatgtcgccgtacttctcgccgaacaggtgcatggcaccgagggcgatggcgtcgtcgaacttcatttccttggtggtcacggcgaggttgtcgcgcagcttgtcgttgacgcgctcctcgactgcggagatcacggacttggccggggccttggaccactggaagtcgaagcgcagacggttcggggcgtcttcggagccgcgctgggtggcctgcgggcccagctcctcacgcagcgccttgtgcaccatgtgcgtggcggtgtgcgagcgggcgatggcgccacggcgggccaggtcgatgttggcgttgacttcggcgccgacgaccagcgtgccttcggtcagacggcactggtggacgatgaggtccttgatgggcttctgcacatcgtcgacttcgagcacggcgccgtcgtcggacaggatctcgccctggtcggcgagctggccgccggcctccgcgtagaacggggtgcggtcgaggatgacctcgacgttggccgggccggtcacggcgggcacggaacccttgccttcctgcatgatgccgatcaccttggcgcgggcggacatgtcggtgtagccgaggaagtcgatcgggctgacgagcgtcttcttgaagtcgtcgtaaacggaaagatccacgttgtgacgcttcttgagggcgtcggcgcgggcgcgggacttctgctcggccatgagttcgcggaacttggcctcgtccaccttcacgccctgttcggcggccatctcgagggtcagctcaatcgggaagccgtaggtgtcgtgcagcttgaaggcgtcctcgccggccacgacgggctcggcggaatcgctcttggccttgttgacggccacgtcgagaatcgtggtgccggtctcaagggtgcggcggaaggcgtcttcctcgccatacgcggattcggacacctcatggaaggtgtcgttgagctccgggtagctggcctccatggcggccttggaggtcgggaagagggtgggcagcaccggatcggtcacgccgagcatgcgcatggagcgcacggtgcggcgcagcaggcggcgcagcacgtagccacggcccacgttggacgggcgcacgccgtcggacatgatcatcagggcggagcgcacgtggtcagcgaccacgcggaagcgcacgtcggcgtcctcgttctcgccgtacttcaggccggagagctgctcggcggcctcgatgaccgggaagacctcatcggtctcgtagatgttgttcttgccctgcagcaggtaggccagacgttccaagccggcaccggtatcgatgttcttgttctcaagctcgcccacgatgtgcaggtcggtcttggacttgacgttgtcgacctcgtagttctcgaacacgaggtcccagatctcgatgtagcggttctcgtcggcaatcgggccgccttccttgccgaaggcggggccgcggtccacgtagatttcggagcaggggccgccgggtccggggccaccggtggtccaaaagttgtcttccatgcccatcttctggatgtgctcggggtccacgccctcgttgatccacatggaacgggcttcgtcatcgtcggtgaacgtggtcatccacagcttctcggggtcgaagccgtagccgccctcatcctgcgaggtggtgagcagctcccaggcgtagtggatggcctcttccttgaagtagtcgccgaaggagaagttgccgagcatctggaagaaggtgccgtggcgggtggtcttgccgacctcgtcgatgtcgagcgtacgcacgcacttctggttggaggccatgcggcgcttcggcggggtctgctcacccatcaggtacgggatgaacggcaccatgccggcgatggtgaaaagcgtggtggggttcggggaaatcagggatgccgagggcacgatgagatggtcgtgcttggcaaaataatcgaggtatcgctttgcgatgtccgcagtgcgcatgagcggatgaactccttgtttgggtaatgggcgcagttgcgcctggtattggtggaaaagactggattatgaggattagtttgttctagctgattcagtgactagatggcaaggcggcatgcgcgtgtcagttggcgcgctcgatgtactgacggttgagctcagcctcgcgggctcgacgggtggcattgaactcgttgaccaacccttcgagtgttttcatcggcacattgtcctgatcggggccaagcaggaactggcgtgccgcatcaggcgtattggccttgacataggcctgtgccttggtgacggcaacgattccgatggccacgccgacgccgacccagaagatgcgtttgaacatcactcccccttctcggcggtgtcgttgacggtggttttcgcggcgttcttcgcaaggaaggactgacccgtggttttcagcgcgtagaaggtggaagcgatcttgatgatgggcttaccgaggaaggagccatacagatcggtcaacgcaccaacgttgttggcggtggtggaagccgcggcggaaatcttgttcacgtcttcgagcgacttgttgacctgcttgacggtggtcacgccttcgtccagcgcggggatggcgtgttcaccggactcccggaccgtctgcgatatctgatcaaacatcttgcccagcctgatcagcggatagatcatgaaaccggccaatactgcgaacgcgatggccgcgatcaggccagcgatctctccgactcccattgtttcctccttgcggtcacacttactcgcctaagggtagcactccttccctatttcttggcataccattgcatgcgcagggcgaaaaccgtgcgcgtgggcgtatgcggctataggcgaaaggctgtcctgctgacgctttcgtttgcggcgtgccgccgtggaccgtacgtgctattcgatatgtattgcttgctatttgctacttgccgtacgaaacgatggtcacggcttcgccgaacggcttgtcggtgtcgaagtcgatcacggttaccgaaccattggccgggcgttcgttcagatcgaggtcagggccgccgaaccggtgaccgaggctaagcagtgtgttgccatgcgaaatctgcagcacatcgtcgccgtccttgagattcgggttgtcggcgataagacggaacgcaccttcgacgcgcgtccaatattcctcatcggattccgcgtcgtggaagggatcggcttccttgagaaaatcacgcgaggcccccaacccgaacttctcgacgatttggttgtaggttttgacgccgtggggcgctcccgcggcgtaccaggccatggccatgtcaagtccctcgtagtagccgtagaactgctcgcggaagtgcatgtccgtcacgagtgcggggcgcgggttacccgcggcttcgttgatgtcgagaattttctcggccgtctgctgggcacgcgtggtgtccgaacagtaggcggcggcgaacgtcaatcctttcagtcgctcaccggccttgacggcatcggcgacgcccgactcggtcagcggcgaattcgaccatccctgcagacggttgtatcggttgaaataggtctgtccgtgacggaccagatgcagatgaagaatcatggttctgattatgtcaccattccggcggtttcggtgcgggttgccggaagtcataagtcataacggcataggtcactacctgagatatgcgtaatccgggcagtatacctaacgattcctgagagtacacttagaatactgtgagcataaccttgaaacctgcaccatctcgatcgtctgtgcctgcccatttcaggggtatcgatggactgcgcgctctggcgattcttggagtcatagcattccacacccgcccgtcgctattgcagggcggattcattggcgtgacgatgtttttcgttatcaccggttttcttgccacacgttcggtactgaacatggtggaccgcaccgggtcctttggatatggccgatatctgatccgccgcattactcgtttatggccggtgatgctggcgaccattgccgtggtgccttggctcacttggatgttcgctcccagcctgttgcagaaagtggtttccgattcgctgccgagcgccttgttcgccagcaattgggtgtacatcttccgcaaggtgccgtatttcgaggcggccggattgccttctcctctgacccatctgtggttcttgggcgtgacgatgcagttctatctggtttggccgttgctgatggtggtgctcggcaaaatcaccaagtccaaatgggtgcgctccatggcgattcttgtcatcatggctgcttccaccgccgacatggtgctgctgtttgacccggccaatacctcccgcgtgtattacggtaccgatactcgcctcgccgagctggctgccggcgcgctgttggctatctggattgcgccttcctcgcgaggtacggaagctgcggaagctggagcggcttcgcaaacagtgcagatcgaacgtcaggccggcgacaagacgggcgcccgtctcactatcgtctgcaatgttcttggcaccgcggctttggcggcactgctgaccggattctggttcgccaacgggtatctgtcgtacatgtaccaaggcgggtacctgattaccgcgttcatatcgttgtgcgccttggcctgtgccgtgaacaatgactcaatctggtcgcacgtgctgggttgtgctcccctacgctatatcgggtcgcgatcgttctcgctgtacgtcatgcattatccgctgctgcagttcatgaacccggcgacacgaacgcaggcgttgccgtggtggggttgggttcttgaggccgtcgtggtgttggcggcgtcggaagccttctaccagctggtcgaggcggcccgtaaatcggtgcagatgcctcgtagccaacacgccaagccgctgccgaaagccggctaccggctgcgcccgggcgcgtgggtcatgtcggttatcggattggtgaccgttgtggcgctgacgtgggcaccggtggactggaatggcatcgctcaagcgcgagccattcagctgcgccccgaactcgcggcacccgccaagccggtcaagaaaccggcgaagcccgagcccgagtcttctgccataaatgccgcgaacggcgaaaccaataccgctgacgcgaataagaacggttcggattctcagccgcccatcatcaaaccgattgcggaaaaggtgccaaacaatcttgacatttcgaagtacgcctatgatccggcaacggaaagctgcaacgcggatatgatgatggtcggcgattcagtgacgtcgggtacttcggacgccatccaggccgcattcccgaacgcttttatcgatggcctgccgaaccgtcagctgccgcaggcggtggatgtgtatcagcaggacaccgctgccggccacagtggcagtgtggtggtgtttggcctcggcacgaacggcgtgatttcgaatgagcaggaagtgcaacagctcattgacctgaccggcggcaagccgacatacttcatcaccatccgtatgccatacccgtggcaggagaacaacaacaatacgatgctgcgtgaggccgccaagaagaacaagaacgtgggcatcatcgattggcatgggtatagcgaaggtcatagcgaatacctcaacgatgacgacattcatccgaatatgaccggtgcctatgcgtacgcgacgatgattcgccaggcggtgtgcggccagtaatcgccctacaacgcaggaaccccgcggcttctcgaaagaagcgcggggttcgagcggtatgtcctggatttgttgaccagagggcccggatcagcgggcgtagaattcgaccacgtactggatgttgacctgcaccgggatctcttcgacctccggcttacgggtcacagtggccttcagggacggcaggttcacgtcgaggtagccggggaccgcaggcagcacgtcacggtgcacgccttcggcggcgatctggaacggaaccatggtctggctcttggccttcacctgaatggtctggccgggcttgacgcggtaggacgggcggtccacgatgttgccgtcaacgaggatgtgacggtgcaccacgaactgacgggcctgggcggtggtgcgggcgaagccggcacgcagcaccaggttgtcgagacgggtctcgaggtcggtcagcatggcgttaccggtctggccggcagtacgggtggccttctcgtaagcggcgcgaagctgcttctcggagatgccgtactgagcgcgcagacgctgcttttcgcgcatacgcaccgcgtaatcggactcggtgcggcggcggtcacggccgtgctcgccaggagcgtacggacgcttttcgaagatgcgctgagccttgggggtcagtgcgatgccgagggcgcgagacagacgcacctgacggcgagaacgctgaacgttcgtcattggattaatccttctgtcgttatctgaacggaacgcttgccttgcatatgcctaacaagcgctgagtcgggcctccccagcgcttcgtcgtgaataaacacgaacgggttggttttcttgcgattacctaccgccgacccgctgatgggctatgactccagacggtatctacctgttggcagacaccagcagaccatattacaccgaggctatggacagcactccggcgtccatgcgatacacccgatctgcgtattcgagtgcatcgggatcatgggtgaccatgagaatcgccgtgccgttgttggcttggtctctgagcagacgcattacgatgtcggtgctctcttggtcgaggtcgccggtcggctcgtcggcgatgagcaagctcggctggttcatcagcgcgcgggcgatggagacgcgccgcatttcaccgccggacagctcgcgcgggtagctgtctgccagatcggcaacaccaagctgggtgaacagcgtgcgagctcgggtggcgaacaggtccgaacggctcgcagccgtgtttgacggcgtgttttcccggtctgtgattggcgcaatgacatccggcatgaacgggtcggcggctgaatcggcggccgcttcatcattggtggcagcggcttgcgccacggcatccgttgcttctgcgttttgggcgaacggcagcggctccggaaacatcgttgcgggcagaatcacgttgtcgagcacggtcaggttgccgagcagggtctggctttgagtcacgaatccgatggtgcgattcctcagcacggacagtgctttatcgcccaagtcggccacattgcgtccagccacgctcacggttcccgaggtcgggcgaatcagcccagcgaccatgttgatcaacgtacttttaccgttgcccgaccggccgacgatggcgatgaattcgccggcatcgacggtgaggttcacgtggctgacggcgtcgaacggcgtgccgcggcggacgaactggcgggtcaggtccgtcaaggtcagcagatggtccggggagggcgtctcggttacgtgcggcgaatccggcgcagtcggcgcgttcggctgagctggcgtggtcggctggagcttggtcggctcaaccgtggtcggctgaagcggcgtagttgtctcagtcatatcactccccctctcgcagggtcaggtaggcttcgggccggccgagacgccacatggtggccagcgaaccgatgatgccgatgaccgtagagcacacaatggtcacggcaatgaatccgatcaccgcaaccgggctggcttgcagatacggcaattgaagctgtttgccgatcagcgaactgaatgggaaaatcaccaggctggccgcgccgacgccgattacgccaccgatcagaccgatgatggcggattccttcagaatgatggcattcaacatgccgcgcgtggcgcccatgatgcgcagggacgcgaattcgcgtttgcgttcgttcaccgacgaggcgaatacggcgagcagcacaatcacgcccattacccagatcaccgccacgaaaatcttgaggtaggtgacaagcgcggtcagcgaagttctggtgttggcggtgatgccgccggggtatacgtaccccaaatcggcgaatcgggaatcaagacgcttgatgttctcagctacggtctgcgcttcgtacccctgctgcgtcttaatcatcacggtggagacggctttgccggcatattcggcggacatgacctgcttggagaccttggccgaggcggcgaccatgtcgggcacggtgttttggctgatgaacaccgagttgtcgaggctggtgccggtgttggcgagctgggcgacgaccggccatgaacggccgtagagttcgatggtgccgtcggtggacacgttgacgtttgcgcctgcaatcatctgaccgtcttcaagggggccttcgaactgggaggcgacccatggttcgatgacgaagtcagtgtccgggtcgtaaccgatgatctgcagcttttcggcacagcaggcggcggccagcgatgatatataggtctgttcggtggcctgtgcgatgccgtcggcctgcatgacctcgtcggcgatgtctttggtgaaatagaaagtgctgggattgccgttggtgagcagcgcttcggccttctgcacggtgttttgcagcacgaccatgaggtcggcgcccaggcgcttttccatactggtcatgccagtgttgaggttcatggtcagcatggtgccgccgaagaatgtcagcgcgaggatggtgacgacggcgagcagtgcgccggtgcggaacggcttgcgtttgaggttttcaatcggaaggccgcgcaatgcgatatgggatggcacgatgaatccttatgttgcttatagtgcggttgcaataagcgaggccggagtccagcgttcggaatggctgggctccggccgtctgctcgatcagttgcgcttggcggcgcgagagtcgagccagatggcgatggccgcgaacacgatggtgagcacgccgagcacgatgagcgtgggcagcataaccatgcgacagtgcatcatcgcgcccttgcagatgccgatcagaaaggtgggtacggcgagtagtagcagggcgtcggctgcggcggcgatattgaggccgatgcgaatctgcggggcgacgaacaaagccacgacgccgaacacgaggatgacgacgccgatgccggtggccgcctgctgcgagtagtggcaggcacccggcatgtcatggccggtgcaggcgtgcgcaaaggtctggggcgcgatggtgatcagcgcgccgaacagaatattgggcacggatgcaaacagcttgttcttcataactactttttcctctcccctgttcccagggctcgtaggcacaacctccgcattatgcccacactgtgatgaagaacacaagtcttgttttttgcgaatttatttggtatataactcagcccctcgtcagaggggccaatttatctacaacttctcaatcggcgctacgcggagcatgaggcgtttgacgccggcggagccgaagtccacggtgattaccgaattgcggcccttgtcttgtgcgtcggtgaccttgccgagaccgtactggtcgtggctgatcatgtcgcccacggcgaagtcggcgatattcaggccattgtccttggtgagcttcgagctaggcacggcagagccggtcgaatcggatttcggtgcggtacggcgcgtggtgaccttgccgccacgggtgccaccatatgaaccggacgaagaaccgggacgggaacgggagcgggaaccataggaggacgagccggagcgggaaccatacgacgatgaacgggaaccatacgacgaagagccggaacccgagccatacgacgacccataccgcgaccgcgacccataggacgaacccgaaccggacgaaccacgcgagccgaacgtcgacgacccgccaaacgcggcgccgccgaaatcgtcatcatcccagccgcccaaatcgtcggcgaatccatcggtctcccagctggcgcgcatacgctccacgccggcttcacggcgtttccaatcaatcagcgaatccggaatctcgtcgaggaactggctgggcatcatatcggcggcctggccccactgggagcggacggcggcgcgcgtgacatacagtcgctgcttggcgcgcgtgatgcccacataggcgagtcggcgttcctcctgcagttcagtggtgtcttccatcgaacgcgaatgcgggaaggtgccctgttccatgccggtcaggaacaccaccgggtattcgaggcccttggcggtgtgcaaggtcataagcgtcaccttgccggagtcctccgcctcgccgggtagttggtcggagtcggccacaagcgcggtggtctccaggaatgcggacaacgtggcgtcaggcgtgttctgttcgaattcggcggcagtggactgcagctgggagaggttctccagacgggaggcgtcctgcgggtccacggatttctcgagttcggcccttaagcccgacttctccaatacttcggccacgatctcgctgggcttggagtcgtgcgcgcgcgtgaactgcgagagcgcgcccatcagatcgcggaatgctcgtagcgaggtggcggtgcgtgtcggcacctcgatctcatccaagtgcatgagtgcgtagaagaagctggtgccatgctcgcgcgcgtaggcgagcagcacgccttcggcgcggtcgccaagcccacgcttgggcacgttgagaatacggcgtagattcacatcgtcgtccggattgacgagcgcctgcaaataggccagcgcatccttgatttcgcgacgttcgtagaacttggtgccgccgacgagctgatacggctgattcgtgttgatcagcgcctcttcgagcgagcgggattgggcgttggcgcggtacatgatcgccatgtcggagtaggcgatgcccgcttcggcgtgcaggcgcgcgatttcggtggccacccactgggcctcctgctgggcgttgtccgccgcgtagccgacgatcggctcgcccttgccgagcgcggtccacagtttcttgggcttgcggccctcgttgttgctgatcaccgcgttggccgcatccagaatggtctgcgtcgaacgatagttctgttcgagcatgatggtcttggcgttcgggaagtcctgctcgaagtcctgaatgttgcggatgtcggcaccacggaacgcgtagatggactggtcggaatcgcccaccacggtgatccaggcggggccggacttgccggcgttaggcgcgcccgggatggccttctcccccgtgtccacgccggccagctcgcgcacgagcacgtactgggcgtggttggtgtcctgatactcgtcgaccagaatgtaacggaagcggtgatggtagtactcggcgacggccgggtcagtgcgcagcaactcgaccgtgcggccgatcagatcgtcgaagtcgacggcgttggccagggccaagcgatgctcgtattcggcgtagatcaccgcgtagatggcttcaaggtcgcccaccgtgccgaactggtagccgcgctggccgggcgtgaagtcgggcgcgtgaacggcgaggttttccttccaaccggtcagattgttcttgaggtcggagatatggccgagaatcgagcgtggagtgtagcgcttgatgtcgaggttgaattcggtggcgatgattttgacgagtcgctcggagtcggcggaatcgtagatggagaagccggacttgagtccgatggacttgccgtcgcgcctcagaatgcgcacgcaggcggagtggaaggtggagacccacatgcgctgggccaccgggccgatcagcgagccgagtctttcgcgcatttcggcggcggccttgttggtgaaggtgatggctagaatctggctcggccatgcgccgaactggctcaagatccaggcgatgcggcgggtcagcacgcgggttttgccggagcctgcaccggctccgatcagcagcgcctgaccgcggtattgcacggcttccgcctgctgcgggttcaggtcgcccacgagttcctgtgcgctgcgtgcgatgacttccggctcgtcgtacactgttgcctccctttgaatcgcgacattcatgtttaccacatgcacgggtcagcgcaggacaacgtacacttacgagtatccatatcattcactgacatacaacaatgggaggttcaatgcaggaacttgaggagcgaatccaaagcgagggaacggtgaaggcgggtaatgtgctcaaggtggacgcgtttctgaaccaccagtgcgacgtacgcctgttcgaccgcatgggttcggcatgggccgctcatttcgccggcaagcacatcaccaagattctgaccatcgaggcgtccggcatcggcattgcgtgtgtggcggcccagcatttcggcaatgtgccggtggtgttcgccaagaaggcgcagtccatcaaccttgacggcgaccagtacaccaccacggtctattccttcaccaagcagaaggagttcccggtgatcgtggccaagaagtatctgaacgccggcgaccatgtgctgcttattgacgattttctggccaacggcaaggcgttgcgcggtctgatcgatctgtgcgaagcagccggcgccacggtcgagggcattggcatcgccgtggagaagggcttccagggcggcggtgacgcgctgcgcgctgaaggctacgatgtggattcgctggccatcgtcgagtccatgaatcccgagaccggcgaaatcacatttaggcactgagcacattggctgctcccgccggcgggagcaacagagagaagaagagaatcatgtcagagaagaaaaccaatcattccgtatcctttgaggcgttgtcttcgctggacgcgccagtatccttctggaagggcattccgttcggcctgcagcatgtgatggccatgttcgtggcgaacctcgccccgatcttcatcgtcgcctcggccgcgaagatgaccccggcccaatcggccaccatcatccagtccggcctgctggttgcgggcctgggcacttgcctgcaactgtacggcgcgtggctcatcggctcgcgacttccgatggtcaccggcatctccttcacctacgtggcggccgccgtggcgatctgcgcggacaagggctatggcgcggtggtcggcgcggtaatggtcggcggtctgctggaacttgtgctgggtttgacggccaagtattggcgtcggttcgtgccgcccatcgtctccgccatcgtggtcacgtcgatcggcttctcgctgctcaacgtgggtgccacgagcttcggcggcggcagcggagccaaggacttcggttcctggcagaacctgacgctcgggcttatatctttggttgcctgcctggcgttccagctgttgatgaagggcacggccaagcagctgtccgtgctgttcggtctggtggtcggctatgtggcggctatctgcatgggcaaggtcgatttctccggtttccagaacctcgccatcgtgtccgtgccgcagttcatgccgttcaagcctgagttcgactggggctcgatcatctccatcggtctgctctacgtcgtctcctcggtcgaggtgctgggtgacaccgccgcgctgaccaaggtgggcctgaaccgtacgcccaccgaacgcgagaccgcgggcgccatcgccggcgacggcctgatctccaccgtatccggcctgttcggctgtctgccgctgacctcgttcgcacagaacatcggattggtggccatgaccaaggtcgtcaaccgcaaggtgattctctccggcggactgattctggtgctggcgagcttcgtgccggccatcgccgaggtgttcaactcgctgccgcaggcggtgctcggcggctgcacgatcatgatgttcggcaacatcattctttcgggcttccagatgattgccgaggcgggcttcacgcagcgcaacatcacgattgcggcgctttcgctgaccatcggcatcggcttcacccaggtgagcgacatcttcacgcagttcccggcactgttccaacaaatcttcgcctcgaactgcatcgccgtggcgttcgtggtggccgtgatcctgaacaccgtgctgcccagcgaggagcacttcctctctgcgcccaaggaggcaccggccgcggacgccgagtgataacaacgcaacatatcagctgcgcataatcacatgatgatgccctatcgtcttgcaggatgatagggcatcattgattttgggagagactacaagttgaaccatgagttcgagccggtggcgtgtcgatcaatcgtcatcttcccattcgaggatgtctccgggttggcagtcgagtgccttgcagatggcgtccaacgtggtgaagcggacggctttggcacgtccgttcttcagaatggacacgttggcgggagtgatgccaatttgttcggcgagctcgccgacgccaatcttgcgtttggccatcatgacgtcgagattgatgcgaatcgtcatctcaaatcacctgctcgagttcgcgcccgagccggacaaggagaacagtttccatacggccacgaacgccgcttcgatgcagaacaggaacagcacgcccataatgagatatggccagcgcatcgacgtctggctcgggtagaggccggccagcgcgccgctcaatcccggtacggcgaatagttggccccataggcaggccagccagaccagaatcacgatggctttcaacgcgagcaacacccatcggttcatgtagtttttcatagcccggtcctttcaggtgccgacgttttttttggcgacaccgcgaacatcgatatgactatatcgaaaaacgatataccttgcaaggcgtattgcgtcaaccggcattggtcgctcgtatacatataggcttcggcagactgtcagcagaccgtcagctcaacggagcgaacgccatatgagccacccattcgcgcacgagcgtgatgacggcttcgggttggtcgatgtgcgcgttgtgaccggcattgtccagcgtcacgaaggtggcgttgggatagtgcggcaacagggcttgctgatcttcgtatccgacgatctggtcttgcttgccggtgacgatgagcaccggacccgcatatgtgccgagcatttcctcgggattatcggccagccaatagcgctgatccagtcgttcgcatgccgcacggtcgcacaacgccacgccgggcaggatgaaccgttggtagcgtcgccacgcgtcgaatgactggttgacgcccatggtaatgaaatcgaacacctgttcctgcggcaaggagtgcgtcagcttgggattgggctgtgcaaccacatgttcggccacatgccggccggcatgctgcgggtccacgaccggcgcgatcaatgccataccggccactcggcgaggttcgcgcgccaatacttcgcggacaagcgcaccgcccatcgagttgccgaccatggcgaatggagccgctttaccgacaagaccgtcaatggccgtttgcagccaatccgccatttccggcagcccgcaggcatgctcgggcaatgccggcgtacggccgaaaccgggcagatccagatatatacggcgaattgaatcattgccgtcaaacgccttgtcgagcatcatcagcgaacgatggtccacacccatgccatgcacgaacacgacgggcaatccatcatcattgccctcaatcgcgcagtacggctgcaattgcgccatgtgttcctctccttcaacccggtacaaatcgcctttcacacaatagcggcagcagctcccttggtgtcggagcaatcccgaccgccattctcggtttcgaggggctgatttgcgcggatgtcatgaagcgtgaagacttgtcacaaagtcgcgtgatgacgcagccgccgttcaggtggatatgccacgctgtcatgatgacggccgagccggaacacggcaaatcccgcatgctgcataggccagccggtcacggtcagccatgacaccgaaatattggaggcgcaatgggacaacaggtgcggtacggcagacgccgctcccatggcgcgggcgcgctgattgcagccgtcatacttgttgttgcggcgctgatcgcggcatggacgctgctgccacggctattcacgcctcgcgagaccgcgcgcacggccgaggaagcatattgcgcggcggtgtcgtccgacggagcccgccgcaccttgacgcctgatcaggcgcagaacgcggcgctgattgcgaacatcgccgtcacgcgcggactgccggatcacgcggcgacggtggccatcgccacggccatgcaggagtcgaggctgacgaatctggactacggcgacttggattcgctcggcctgttccaacagcggcccagccaaggctggggcacggcggagcaggtgtccgacatgacctatgcgacaaacatcttctacgatcatctgctgcaggtgccggattgggagacgattccggtggaggacgccgcgcaggaggtgcagcgctcaggctacccggaactatatgccgcatgggatgcgatggcacgcgcttgggcctcggggctgaccggtgaacggtcggcgggcgtcacgtgcgcgttggagccagcaacctcctcggacgcggacgggttggttgccgccataggaggtacactgccgaatgtcaatgtctcggttgtgcccccaaatggcaaaaccggcacgaacaacggcgctgcgaccaatacggccagcacaacgttgacgatcacgctgccggacggcctgtccgccgacaaccgcactcgactttgctggcagacggcaggctggctggtcacgcatgcacgtcaatacggcattgacgcactgcacgcggacggcatggattggaaccgcaaagccggcacatggatcggcaccgaaaccgccgagcagaccatcaccttcacgcttgcgtgatgtgacctataccgccgttgcgaccacaaatccgactggttggagcctacgccgtcgatgccgcctgaggcacgatacggatatgtttttactcgttcgaatgagcccaatccacgacggcttcgatgttattgccatccgggtccagcacgaatgcggagtaatagccgggatggtacgggcgcggaccgggagcgccgttgtctcggccgccggcggcgagcgcggctgcatggaacgcctgcacggcttgctgactgtcagccaagaacgcgatgtgtgtgaccggcgtgaccggcgaagcctccgcctccagcccttcaatcggtgacacgtagaaatcggagtgcagggttccgtcatccacgccgaatccgagcgtaggctcatgatgcgccttgacgatatagccgagcggtgcgagcgcctgtttgtagaatgtgatgctacggtcgatgtctttcacgtgcaacgtcagatggtccagcatggtcttggtcgccctcccctggttcttgtattcgattgctgcttgcagtgtaagcccgaacgtttcccacagggccgcgcatggctatgatgagagcaatcgcacgtcgagttcgagacaatattcaaaacgaatccaaggcaataaggggaatgacgatgaccaaggcactgattgtggtggatgtgcagccgacgttctgtgaaagcggcgaactgggtgtcgcaggcggcaacgcggtcgccgagcggattgccgattatgtgaacgcgcatcgcagcgagtacgcgtatatcgcaaccacgcaggactggcatatcgagccgggcgcgcactggtcggcggagccggatttcgtggacacgtggccgaagcatggtgcggccggcacgctgaacgccgaattgcatccggcgatcaaggcgctgaatatcgagcatcatttcaagaagggccagtattcggcggcatattccggttttgagggtatcgaggacaataccgaccgtatccagacccgcgaggaggtcgaggccgagcaatccgccggcaagacgctggccaacgcgctgaaggccgccggcgtgagtcgcgtggatgtggtgggcatcgccgaatcgcattgtgtcaaggacaccgcgctcgatgccaagaagctcggcttcgaggtcaccgtgttcgaggatctgaccgtgccggtcagcgaggaacttggtgttgcggcccgcaagcagatggctgcgggcggcatcacattggctgagtcccgctgatcgggccggatatacccagagcgaagcacacagccgtagtatcaatcacgcgcaagattcccacgccacccaacatagcccgcccgcctcgaccggccgatatcatcggcgaacacgcggaaccgaaccctacatcgacgttcgtttcgtctggtttggcccatgaattctgcatgaattggggtgaactggcggggctgaaggcgagcgggcggcggattatggggcacaatggtttcaaggaggccgccatggtcgatgactatactgccaaaatgactgagctgatcgaactcatgcgtctgatcggcaacgatacgcaacagtgcgaggtcaaggaatgcaagcgcaagatctcctcgaccatcaccgatacgctgtccgcgttctccaatggctccggcggctggattatcctgggcctgtccgaaaagaacgggttcacgccggtcgagggattcgacgcgcgcgccatgcaggaggcgctgagccaggcgtgcgagaagatgacgccggtggtgcggcccgtgatcgtcacctgcccgttcgaaggcgcgaatctggtgttcgcgcgcatcgacgagatgctgccgcgcgacaagccctgcttcaccaccgcgctcggaccgcacggcggctcgttcatccgtaccggcgacggcgaccggcgcatgacctcctatgaggtcgaccggctcatcgaggagcatctgcagcccacatacgatctggatatcgtgcccgacgccacgaccgatgacctcgacccgcagcttgttgccggactgttggcacgcgtgcgcgaacagcatccgcgcgtgttcgccgaccgagacggcatcgatgtgctgctggatctgcaggtgttgcgccatgatgattccgacgagtcggaggtcggcggaatcctgcgccccaccttggccggactgctggcgttgggccgctatccgcagaagttctatccgcggctcggcatttcgattgccgtgtttccggggacgagccgggacgatgtgttccggggtgacgaacgattggtcgcctcgaagtcggtggtcggttcgattccggtgatgatcgacgatgcggtcgactcgttgatgcgttggattggcgcgaagaagcccgactatccgccgctcgtgttgcgcgaggcgattgcgaacgcgctcacccaccgtgattattcgcccgatgcgcgcggcacgcaggtgcatatcagcgtgttcaccgatcgcatcgagatcaccaatccgggtggcctgtacggcatggtgacacatgatgtgctggcgagccctcatccggtgacgggcgcgccgttcgtctccacccgaaaccagttcctgttcacgctgctggagtccacgccgtatccgggcggcgggtttgtgaacccggaaggcggcgacggctaccagcgcatcgccgccgcgttgcgcgaggccggcatcgagccggcgaccacgcgcaacgacatcaacacgttcacgatgaccatcaccaagcagcgcacgatggcgaacagttcaccgggcgacgtggtcaaggcgattatgaccgtactggagcggcattcggccatgagcgtcaaggagatcatgcgcgaactgcagttgacgccgctggccgccacatccggtatgcgcgagctgatgaaggaagggcgggtcgcccgagtcaagttcgccgacgacccggcacagcggtatcggttgaaaggctgatttctcactcggccagctgcgtggtggcgggcgcggccagggcggggcgggatcggcggaagcggccggcggccaggccgatgcagatgaacatcacaccgaacagtgcgaccaatcccagcgagccggaccagccggcgacgcttatgccggtttccgccgccgtgccgaagccgagcgcgttgtcgatcgcggtgcaataccaccagccgggcaggaacttggctatggtcaccatcacgccgggcatcatgtcaatcggcaatgcgacacccgacgtgaacatgatgagcaggccgaagatgttggcgaacccgttggccgcctcttccgagagcccgaactcgctgagcatgaatccgcaggcgacggtcatcagcgcgtacacgcaggtcgcgccgaacgtcatcagcactcccccgacgctcaggtgcaacggatcgagccccgccgccatcatcagaccgattgacagcaccaaatagccgacgcatacgacgagcgcgaatccgcccaacgtcagcaaccgctggagtcccatcaggaccatgcgtcggggcgaggcggtgagacgccgccgcacctcgccggtggtgaacgcgcccaggatcatcgatccgcagatggtcatcgccagggacagcgggtacagcgcggttttcatggtgccgccgaatccgctgaccgccgtatccgcagcgcttgccgactcctcggtcggcgtatcgaccacggcgatctgatggttcacgtctgtatcgctggccgattcggcggccattttggcggcctgggacagatccttgatatccggcttgtcgacttgcccttccggcagcgagtccagcatgtcttggtccagactcgcgccatcaaaaccggcggcccctcctgtagcgttcatcatgccggcgagcgccgcctggtcgaccctcgtctgcgcgccgatcagtgcggtgcgggtgagcgagaggaacccgccgacgttcatccgcgccatcgacccggagccggatgcgtagctggcaaccgtgtccacgttcggcggattgtcgccgtccgccgccgcggcgacataatcgtcagcgaatccgtcgggaatgatgacgatcaggtccacccagttcgaggcgacggcctgttgcagcgtttcgctggtgtcgtcgaggtccaccagttcgctggaatcgcgcaggtaggcgcgcatcgacgtggcgatatcaccccggtcggagtcgcggtcgatgatggcgacgcgcgtcttggtcgattcgaacaccgcggacatggagccggatgcggaggtcagcatcgcccagctgatggacatcatcaggatgcctatgaatacgaggtagatcatcaggtagacccggtgcgcgaacagcacgcgcagcgtggctttacaggtgttcataacgttgcctcctcagcattgcgatgccggccaagaggaataccgcgctcatcgccagcagaatgatgcaggtggtgatgaacggccggtagctgtcgtagtacaggatgtcgtagaacaggttcgtcacctgctgtgcggggttgatggtgccgagtatgggcgcgttgcgggctatccagtcgctgatctgcatggcaaacccgccgtacagtccggtgaacagcgacagcgtgcaggagatgccggtcgacagcccgtatttcgtgttgtacgagagcttcggcaccgcaccgagcagggtgcctgctgagctggtcatgaacgaggcgatgatgcccgcgaggatcgccgccggttcgcgtccgccgagcgagacgttgcaggcgagccggatataggccaatgcgatggacagggcgaccgacgagcacagccagcaggagaggaagcccgcgacgagctgtttggcccggctcagcggcgctacggtccgccgtatgcccagcgcggacaggttcgcctgtgcggcggcgactgtgctgatggagtatcccacggccatcatgcaggacatggccagcagcgcgtaatagtatcgggcgatctcgtcaggctggaaatgcgtgagcgtcgtctcatgggtcatgtcgacgttctgcccgacgctgttccagaagttccggctgagcgcggcctgtggattgtcggcgatggtctgccgggtaacggcgtcggtgcggttgtacaggtcgatgacgctgcgcagggccgcgaggctaatgtccagtccgctgttttgcgtggagtccttggctgtgacggcggtttcccggctcacggtcatcgccaatcggccgttattgtcggcggtcagatagccgttggcagtgccgtcggcgagccgttgttcggcctccttcacggtgtcgactgtggtgatggtcagcagcttttggtcgatttcggcgtaggtcgtgtcgtctgaggccgattccgtttccccggccagcgcgtctacgaaggtgcgggcaccgtccgcctgctgccaacgggtgtcttcgatgacggccatcggcaccggcttgagttcgtatgcttcggccagcccgccgaacagtccgttgaacatggtcgccagcacaatcgggaacacggtcatccagaacaacgccgaccggttacgcaagttcgctttcaatgcgaccagaaatgtggtccacatgatgtctccttactcaggaactcccctcagtcacctttggtgacagctcccctcggagaggggagccaagttatttgcttgccgactgaggggagcatggtcagtccctcagtgctttgccggtgagttcgaggaacacgtcgttgagggtgggcgggcgactggtcaggtggccgatgttggcgccggagcgtttcaccgcgtcgagcacgtcggtcaggttgtgttcgccgcgacggcatcgcacgtcgagttccttgccgtcgtaggtggcttcgatcacgcacggcagcgcacggacctcggccatcgccgaatccgccagatcgagcgtttcgatggtgatgcgctcgcccgtgtcgatcatgttcttgagctcgtcggcggttccgagcgccaggtgccggccgtggtccatgatgaggatgcggtcgcagatctgttcgacctcctccatgtagtggctggtgtagatcaccgtggcgccggcctggttgagccgctggatgccttccagaatcgaattgcggctttgcgggtcgacggcgaccgtgggttcgtcgaagaagatcaggttaggcttgtgcgcgatgccgcaggcgatgttcaggcgtcgcagcagaccgccggacagtttgccgggccggaacttgcggaagtcctggagtccgacgaattcgatggactcctcgaccagcggcgcgcggtcggttttcttcggcacgtacagcgagcagaagtagtcgatgttttcggtgacggtcagttcgttgaacacggccacgttctgcggcacgatgccgatacgacgtttcagcgcgtaggaggtcggcgtcatcggctggccgaacacgcgaatcgtgcccgaatcgtaggtgagcagcgcgaggatgcagttgatcgcggtggttttgccggacccgttcggcccaagcagcccgaaaatctcgccctggttcacgtcaaggtcaaaatagtcgagcgccaccatgtcgccgtagcgtttgaccagttggctgacgtgcacggccagagccgggttggttgtcgagtcgtgttcggaagctctgttgtcggttgtcatagtcactcccttccttggcgattccatcatcccaagaaggggccggacgccgccacaggcaaacgtcacgacttggccgtacaggcgtgacatttgtcattacagtccttcggcgtcggtctgcatggccttgtacaccttatcgaccggcatcaggctgatctcgtccatcgaatagttggacgccctgtggctttgcgtaatcatcggtatcatccctttacggttgtgtcgacgacatccgacgcttgtgcctcatctattcgggaagtgtaggcccgttgtcttggaccgtcatgcgggtaattccgcacgcccgtcaagttcgtcgtgttccgcacaccgctagactggtggtggaagagcgtcgagccggggaggtgccatgcgcgtgttggccgagatgggcttgctactcgtgttgggcctggctttggcctggcttgtcgggctacggtccgatggcgtgttcatcgccggcctgctgttggccgtttccgtcgccggattggtggaatggctgcgtcccgcgcaatggtcttgggtcttgtgtacggcgtatctcgtcatcgccgtggcggtgccttcatggtgcgcgttcatgccgctcatcgcctacgatactgcacggctgccggccctcgcctcgaccggagcccgggctggggcacggactgcggcaagtggccgctcccccagtgtctcgcggaccgcggcctctcgccgttcccttgccgatgcaatgcgttcggccccgtggctttcggccgccgcgcgctggatatgggtgttgccgctgatcgcgctctggttcgcccgtggcaccgaccgtctccagacgctggtgatgacgctggtcgccctgcttggattcgttctgggccgggcccgcgcctcctcggacgaggcgcggcgcgcgttgctgcacgcgcaggacagggcgcgcgaatcctcgcgggccactcgttcgcgcatcgccgacatcgatgaggaacgcgcccagtcgattcgcatggcgaccctcggcgagcgcacgcgtatcgcccgggagatccacgacaatgtgggccatctgctgacccgcgcgatcatgcaggcgcaggccggcaaaacggtggccaaggcgacgaacgatacggtcgctgcgcaagggttcgccacgttgggtgcgacgttggatgatgcgatgacgatggtgcgccgttcggtgcatgatcttgaggatgatggcactgatttcgccgcgcagatcgatgatgccgtcacgtcgttcgacggcatctcccccggtttcgccgtgacgctggccaacgatatcgccaaggcgcctgcgccggtctcgcgctgtttcgcgaccgtgattcgcgaggcattgtcgaacgtggtgcatcacagcgcggcgcgcgaggcgagcgtgacgttgcgtgacttccccgcgttctggcagttggtcattcaggatccggggccggccgtgtccgagtccgatgggtcccggacggccgctgcccgcccgcgtgcgatgcgcgccacgcacgtcggctcgcgactcgccgccgacggcgttgccgatatgcgtggttcggccgatgagctgatgcgcggcatgggtttggcggatatcgaatcgcgcgtgcgcgcccttggcggcaccgcggtctgcgggccgtatgaggacggctggcgtgtgttcgtatccgtgccgaagaagcgttggaccatggaatcgagggattgatgagaatcgcaatcgtggatgatgatccgatcgtctgccagtcgttggagacgattctgacggccaccggcacggccgaggtgctatggatggcaaatgacggagacgccgccgtgcgccgttatttcgagacaccggcgagccgaccggacgtgctgctgatcgatattcagatgcccggcaccagcggtttggatgccgcgcgcgagattctggccacggacccggccgcgcgcatactgttcctgaccacgtttgcggaccagtcgtatatcgcgcaggcgatgggacttggcgccaagggctatctcatcaaacaggatgtggcggcggtcgggcccgcgctgcaggcggtgatggccggtcaggtggtgctcggcgcggaagtgctcggcaagctcaccgaacgaactccggatcctgccgattccgacgattccagagataccgccgattccatcgagggcctgcttggcgagcgcgaacgtgagatcaccgcgctggtcgccgagggcctcgataaccgcgacatcgccgccagactgttcctgagcgaaggcacggtccgcaatcgcatcagcgcgatactggacaagctcggcctgaccaatcgcacccaactcgccatcctctggctcaacgcccataggtgagggggcttttggtcaagtaggcctctccctccgacatcgcttcgcgatgccacctcgaacgcgattcaggacagcttgcagctgacctcttattcgctcgttgtcactcaccctcgcctaaaaacgcctccggcgttttcttcacggctcggctcatcagagggaggttgtgaaaaaccaacctcagctgtttttcatgacgatactgtcgatggtgttggccacgcgctcgcagtcgtcggagcactgttcgaggtgacggtagacgtcatgccaggcgaacacctgcagcggatcggtgcaggtggtgtgcagcgtgcgcatcgactcgatgaacaggtggtcggcgtccgtttcgatcgtgttgatggcgaacaccagttcgcgcaacgtcttggaatgccggaatcgcggcagttcgttgaccagctcgcagatgctttccgtggcgcgcaccaccatatccgacatctggaccgcgtcgtcgcgcatgtcggtcacgttgtcgtagtacatgcggttgagcacgccttcgatgctgtcggtcacgtcgtcgagcacgtggccgagctcgtcgatgtcctcgcggtcgaacggcgtgatgaacgcggtcaccagttcgtccatcatgtcgtggcgcacctcgtccgctgacttctcaatcgcgtgcatgctgtccatgcgttcgcgcagctggcccggattgaagtcgtgcatgacctcggacagcagcttcgcggcctggcatgcgtagtccgcgctgcggcggaatccttcgaagtagaacgtgtctttttgtctcgccatgatgggtggattcctttctagaacacgaccatgaacagtttggccattacgaagctgatgagaccgcaaccagggaaggtgaacacccaggtgagcatcatgtcgcgcaccacgccgaagttgatggcggagaggcggcgtaccgcgcccacgcccatgatggcgctggtcttggtgtgcgtggtggagacggggatgccgagcacggtcatgacgagcaggcacagcgcgcttgacagatcggccgagaagccttggtatttctcgagtttcaccatgtcctggcccacggatttgatgatgcgttcaccgccgacggacgtgcccacgcccatgatggtgctgcacagaatcatgagccagatcggaatcatcacaccggtcacgctgggttggccattgcagaacgccatgccgaggaacagcacgccgatgaacttctggccgtcctgcgcgccgtgcatgaagctcatggccgccgcgcccacgatctgcgcgtaggtgaagaacccgttggtgcggcggcggtccatgccagcgcaaatcagggtcacggccttgcataccaaccagccgacggcgaagccgaacaggaggcttgcgaccagaccgtagagcaccttgacccattctcccatgttgatgccgccgatgccgccttggatggcgatggccgctccggacaggccggcgatcaggctgtggctttcggaggtgggtatgccgagcagcgaggcgcccacgctgtatacgacgatggagaacagcgccgcgcatagggcgatgagcgccgcgttcgtgtcgccgccgaaatcgaccatgttgctgatggtggaggccacggaggcgttgagctgcgtcatgatgaagacgccgaggaagttgaagatggccgccatgatgacggcggagcgtacgcgcatgcatcgtgtggtcacgcaggtggcgatggcgttgggtgcgtcggtccagccgttgacgaagatgactcccagcgtcagcaacgttgtgacggtcagagccgggttggaaagcacttgttggaggaaatgcgccagtgagacgtccaaggggaattaacaccttcttcttcgggggcggaagccgtcacactgattgtaacggaagaatggctacgtagttcccatggcgcgcgggttttatggtgttgttatgctattgcggcctgtcagcagcaacaactggtattggggtggagacggtcgtattcctcgcgggcgcgaatgaattcgacctcgctcatcggtgtttcgccgggatgctcggccgcgaaatgctcaagataatggtcgtagcgggcctcgccgctgatctcacgcagataccagacgatgccgtgccatacggcaacgagtttgccgagcattttgtctcctttcgctgattattggctccccttgaaaaaaggggagccaatgacgcactacgctgcaacctgcccgttccgcacaagctcatgcagcttggcgctgtattcgcgctgcaccttcttctcaagcgcggtggcgaccaggctggagggcgcgaaccactgggattccacgaacggctcctcggacgtcgtttcggcaccgtacttgccagcggcgaacgtgcgcgccacgaccacgatgccgactaccacgaagacgcccatcatgaccaggaagaacacggagagcacgccgtccagatacgcgttggacagcgcggccttggcgttggtcagcgcctcgccggtcagctcgccggagtcgatctgcgcctgatacttggaggcggtggtgaagtagctcagcggcccgaagatcttctggaagtcggcggtgaaggtcacggcgatgtcccacacgagcggtaccaccggtatccacaggtgcttccagtagcccatcttggccacacacacggtgatcagcacgaagcaggcggcggcgagcagctggttggagatgccgaagataggcaccatcgcgttgatgccgccgttcgcgtcggacacgcccatccacagcagtccgccccacagcgcggtggcgatcagcgtggtgatgatgttgccgggcttccaggtcgggtcggcgaacttcttgagcttgcgcacgttgccgagcatttcgccgatttggtagcgggccacgcgggtgccgttgtccacggtggtcaggatgaacagggcttcgaacatgatggcgaagtggtaccagaaggccatcgagtcgtggccgcccaggtaggacttgaggaagttggccatgcccatggcgaacgtggtggcgccaccggtgcgggagacgatggaggtctcgccgatgtcggcggcggcctgctcaagcgccgcggcgccttcgtaggtcttggccgcgccgttctcgtccacggaatcccaggtgacctgcatctggttgccttcgatgtcggagaccttcatcgactccacggccttgacggcggcatcggcctgttcgcccggcgtggaggtggcggagatgctcacgccggatgcggcggtgatctgtgcggcggacatgttggtggagaagtacacgccctgcgagatggtgatcgcggcgatcagcgcgatgacggcggtgaacgattcgacgagcatcgaaccgtagccgatcatgcgaatctggttctccttctccacggccttcggggtcaggccggagctcaccgcgccgtggaagccggagagggcgccgcaggcgatggtgatgaacaggaacgggaataggttgccggagaaggtcgggccggtggaggtggaggccagttcggtcagacccggcaccttgacggacgggttggcgatgatgatgccgatgacgagcagcacgagcgtgccgatcttcatcagcgtggacaggtagtcgcgcggggtgacgagcagccagtgcggcagcgcggcggcggcgaacgagtagatcaccagggcgatgacgagctgcttggcgtccagtgtgaacacggcggccacggccgggatagaggcgatccatccgccggcgacgatgtcgagcacgagcagcacgaaaccgagcagcgtggtctcaatgacacggccggggcgcaggaaacgctggtagcagcccatgatcagggcgatcgggatggtcataccgatggagaacacggcccacggcgaggcggccatggccttgatggccacgagcgccagaaatgccatggcgatggcggtcatcaccacgaggaagatggataggatcataccgccgaacttacccatttcatcagtggccatctggcccagagagcgaccgcggcgcttggcggagatccacagcaccagcatgtcctgcacggcgccggcgaaaatcacgccgaggatgatccacagagtggagggcaggtagcccatctgcgcggccaggatcgggccgacgagcggtccggcgccggagatgccggcaaagtgctggccgaagagcacgcggcggtcggtgcgttcgaagttcgcgccgtcatgcacgcgctcggccggggtggcgttcgcgtcgtcggtgcgcatgatcttgatctggatgtaataggcatagaagcggtaggcgatggcgtaggagctcagcgccacgaccaggaaccagatggcggagatctgctcaccgcgcgagacggccagaatcgcccatccgcaggcacatacgatggcgatggcggcccacagcagggccttcttccatgtccataccattttgggacgcacgcctacgggcagtcccttcgaattgcgaatcacacgttcggcttcgtccggcgtgtaatcgtccttgaattccaacttgccaggtgccggggcctgggctgcggcggtggtcataataaccctctgttcctcttcaataacctttgcgggaaaggttctcttcattgcgacccttttggggtatctctcgtctgcttatggcactggttggaagcgtagccacggcatgtagcgcctcaggaaaatgtcccaatatgtgagcttggccacatgttcacggactgcgtttcatgccgattacccgggattcgcaccgcgatgtgcgaaaatggacacggtatcaatcaggaggtgcacagtggttgtaagcacggattcgagccgcacaatgcccgattgggtgaagtacggggtgttctggcacgtgtatccgctgggcttctgcggtgccgatatcaggcccgccggcccgcgccggttccatggccgcggccttgacgcgataattccctggctggagtacgtgcgcgatctaggcgcgtccggcctgctgctgggtccggtgttcgagtcggcgacgcatggatacgacacgctcgaccatatgcatatcgatgtgcgattgggcggggatgccgcgttcgatcagcttgtcgcggcctgccgggacatgggattgcaggtgatgctggatggcgtgttcaatcacgtgagccgcaatcatccggccgttcaggcggcgcttgacgagaccgccggacgcttgaatccggccgacaacccgtggcatggtctggtccgcgcgcatgtcggtgataatggcgaacccgctttggatgtgttcgaggggcacggggatctggtggcgctggaccattcggctgacgagaccgttgactatgtggtccatgtgatgagccattggctggatcgcggagccgccggctggcgcctcgacgccgcgtatgccgtgccgagcccgttctgggcgcgcgtgttgccgcaggtcaaagccgcacacccgtattcgtggattttcggcgaggtgatccatggcgattacccgcgcatcatcgaggaatccacgatggattcgatcacgcaatacgagctatggaagtcgatccagcatgcgctggagacggagaacttcttcgagctggattggaacttgaagcggcacaacgcgttcctggattccttcgtgccgcagacgttcatcggcaaccatgacgtgacgcgtatcgcatcgcagattggcccggccaaggcggcgttggcattggcggtgctcatgacggtcggcggcgtgccaagcatctattacggcgacgaacagggctatgtgggcgtcaagcaggagcgtttcggcggcgatgacgacgtacgtccgaagttccccggctcccctgccgaactgtccacgctgggagagccgacataccggctgcatcaggcgctgatcgcgctgcgccgtcgcaacccatggctgctggatgcgcgtaccgaggccgtgaagctggaaaacaagcacttcgtctatcgttcgacgagcgccgacgcccagcattccctgaccgtggacctcaacatcgagcaatcccccactttcaccatccgcaacgccgatggcagtacagcgtatcaatggtgagctccctcatcagagggagctaactcattcacctctgaatgcctcggatcagcaggtcgagcaggtaaccgtacgaccggtcgacccgttcgcggccgcgtgtgcggggttgtgcggaacgcagttcgaattggatgaacccgtgtatggacacccagatggaggatgcgattagatgggggtcatcgccgcggaatacagatgctgcctggccgtatcgaatgatctgcgtgatggcgtccaggcagtgctgggccgagtccgacgcctgccccatccagaccagcgcgtaaatgccgggggcgtccagcgcgtgttcacggtagattatgcccgccctgcgcaggcgcagcacggggtcggattcgtcaatggcgatgagctgttcgcgcagatcggtgaagtatgtgtcgatgagcgcatcgcacaccgcctgcttgccgccgatgtgctggtagatgctggtgggcgacacatcggcctgtgcggacagcgcacggatggtcagaccgtccacaccgtcccgttccacgatccgccttgccgcgtcaaggattctcccgtggatttcaagggtgggcgtgcgtttggatcggggctgcgattgcgtcatatccgttattctagggtgcgtacaggccattaccgccgtttcggcatggccacgatcacaacgactgcggcgataagtgcaatcgtcatggccgctaggcaggcgaacaggcatccgcatcgcaaacaccggcctataacacaatcaggcccgacgaccatcaaaggtcgtcgggcctgattcatacgcgctgtcggactaacggcgtccagacttcatacggaatggcgcattgtggcgattcttcttggaatgacggcggttcgggccttccgtgttgccgtatttggcgatcatgcggcgttcgtgacgcttggcaccttctgaacgctcgtcgcgtacgatgcggttctcgttcttgcgatggatgcgcttgccgccttcgccctgacgggtgttgcgcatggactgtctgcggccgtcatgggagcgctcgtcataggagaagccgtaatcctcgtggctgcgttcattgcggcgaggcttgcgcggacgctcgaaatcgcgggaatcggaccgttcgaaatcacggcccgcattgtgcctgcggctgccgaaatcatcgttgcgaccgtatccggccctgtcgcgcttatcgaacttgtcgcccttgccgtaccgatcattgcgacagttcttgccgtgctggtcgcggccattgtcctgacgctcgtcgtaccggttcttgccgtatccgtcgcgacggtcgcccttgcggcgctcctcgcggcggtcatcgccatgctcgaacagatagtcgcggcgctcggcctcggggttgctcatgcctgcgcggcgttccgcacggttgcggttcttcttcacggccttcttgctggccttgtcgccgtgcttgcgctgcggctcgccttcggcaacaaactcgccgcctgcgttctcgtgctggaactcggtctcggcaacgttctgctcgtcacggttgcgattgcgattgtgcttgcgcttgccgccgcggccggactcgtcgcccgccgcgttcttggcgcccctgttcttgcccttgcgcgggttgcccacgggctgcgacttgtcgaggctccaaccatccacgcgctcggcgcggtcgcccacaagctcaagcacttcgggcgaatcgtgggtcacttcgatcatcttggtcttgatgccggcctggttcagcaagcggcgcgtctcgcggcgctgctcgggcagcacgagggtgaccacgtcgcccgccttgccggcgcgggcggtacgaccggagcggtgcacaaaggacttcgggtcggccggcggctcgacctgcaccacgagctccacgccgccgacgtctatgccacgggcggccacgtcggtggccaccatgacacgcacatcgccggaatcgaacgcagcgaggttgcgatcgcgctggttctggttcaggttgccgtgcagctcggcggccggaatgccgttctgcgtcaggttcttggcgagcttcttggcctggaacttggtgcgggtgaacaggatgcggcggccttcgcccgaggcgagcatgcgcacgagttcgtgcttgtcgccgcgcgtggtttcgaacacgtggtgggtcatcaggtcgggttcggcggtggccgaatcgacctcgtgcaccttgggatcgtgcaggaaggtgttcaccacttcatccacgccgtgatcgagcgtggcggagaacagcatgtgctgggcgtcgggcgaaatctgctcaagcagtcgcttgaccggtggcaggaagcccatatcggccatttcgtcggcctcatcgatgaccacgacttcgacggacgagagcgtgagcgcctgctggcgcagcaggtcctcaaggcggcccgggcaggcgaccacgatatcggcgccggccttcagatcgcggatctggtggatgtacttgacgccgccgtacaccgtggtggtgttcatgccgaacgtgtgggccagcggcatcagcacgtcgttgatctggttcgcgagctcgcgggtgggggccagcaccaggccgcgcgggtgcggtaggaagtcgtcggcgcggcgctcttccaggctggccttcttgcggcgcttgatttccttgcggaactcctccatcgcgatttcgccgaacgaatcgtaggaaccgaggcgggtgaccagcggaatggagaatgcgagggttttgccggagccggtgcgccctcggccgagaatgtcgcggccggccagtgaatcgggcagggtgtcggcctgaatggggaatgcggtcttcttgtcatctgccgcaagcacgcgcaccagcggtccgggtacgccaagttcgccaaaggtaagggggcgggattccgcgctgtcgttcatctggaaatcagcggaatcgtcacgatcatcgaaattattacggggcacagtggcctttcatgtcaaaggttacgcaaattacgcaagctttccgagcttagcgtaagccccctactttgcttggtgctcgccacactgtcatcccactctttacttatgaccccatggggcggtaactcgcccatggggcggcaacttgcccatggggcggtttgaagaaattgtgaaaccgcagaataaagccattttcacctaccgccccatgagggttttaccaccccatgggatatttgccgccccatgggttttaccaccacgtaaggcgagcaccgctccatggaacacgcaaatggcccccacccgtgaaggtaggggccattgtgcaaaagggctgagccaagatacagcccagtagccctaaaacacactacaaaatatccggatcgtctttggcaatagtgccggttgccttgccaatggccttcaggccgtggtaggccacaagaatcacgatcgtgccaatggcaatgccgttgaaggaaatgccaccaacagtgaacgcgaattggccgatggcaatgatcatggtgatggctgccaccatgatattcagcggcttgtcgaagttgaccttgttctccacccagatgcggataccgatcatgccgatcatgccatacagcagcgtggtcacgccaccgagcacgccggcggggatcgtgttgatcacggcaccgaacttcgggcacaggctcaggatcagggcaaaggcggcggcgcaccagtaggcggcggtggagtacaccttggtggcggccatcacaccgatgttctcgccgtaggtggtggtgccggagccgccgccgaagccggcgagcgtggtgcccaggccgtcggccatgagggcggtgccgatctgattgtcgtagtcgcggccggtcatttgggccacggacttgacatggccaacgttctcagccacaagcacgagcacaacggggatgaacatgggaaggatggagaaatcggcctgcggcaggtggaacttcgggaagccgatccatgcggcgtcgccgatggcggagaagtcgacctggccacggatgcaggcatatacatagccgatgatcacgccgaccaaaatattgaggcggcccagcaagcccttgaacagcacggccacgagcagcacggccaacagggtaaccagtgcggtgtcgggcgcggcttggaagttggtccacacggaaggtgccagattgaagccgatgatggccacaatcgcgccgttgaccacgggcggcatgatgatgtcgatccatttggagccggcgtaatgcacgagcacgccaaccagggccagcagaataccggtgaccatgatgccgaagctggcgaccgcaatgcccttgttggcggtggagaccgcggtgatcggtgcaatgaagccgaaggacgagcccaaatagctcggcagcacgttcctgttgataagcaggaacagtgcggtggacatagccgtgaagaacagggtggtggacgggtcgaagcccgtcagaatcggcaccaggaaggtggcaccgaacatggcgatgacgtgctgtgcgccgataccggcggtgcgcacccaagtcagacgttcatcgggctcgactacctcgccgggcgccagcgtcttgccgtcgccatgcaattgccattggaagatattggacattactactctcctcgctctcgcttggggcacggcattcacaaccagccgcaccacgcaccattctagctcacgaagattttgtgaagtctctcttccgggaaaggctatttgccgtaatactccagcaggtgtggatcgacggcctgcaccacatccaccaaatcgccattggagagatacgggcgcttgaattcgcgccacggctccaccttgacctcccagcggccggtcgtctcgtcgagcacgggccgggcggtctgctcccagcgcacacgcttggaggtgcggccggtttccgggtcgcggcgcgtgtaatgcaggcacgtgcagttggtgatcttccagtcgtccgagtcggcgcgatgcaggaattcctcgtcggccagatcctcgatggtgagcatcagggcgagcatgaagtcgccgtgggtgaccatgaccacggattccgaatcggatttacggctcagcgaggtcaggatgttgtgcacacggtcctcggccacatcggcaatcgactcgcctgccggcggacgccagtacagcggatcggtattcttgaagttccagttgcgtgcgtagttggttttgaactcgtccttggtgatggtgttgatctcgccccaggagcgttcacgcagcacacggttctcctcccacttggctttgggcaaggccatggtggccgcggtctcgcgggtgcgcacatacggcgaaaccatgtagcggtcgaacagctgctgctggctgaccagccaacgaccgatgcagtcggcctgcttgcgtccggtggcggtgagtctccaggagcggtcgggtacggtgacgttgtcctgcgtatacagggagttgtcgccctgttcgcccgcctggacgatgacgttcgcttcggattcgccatgccggattacgtatagatcgagcggcatgctcatatggattcctctttcgttattggttgcgttgtgttgttttctgctgtttcctacttgacctgcgtaatggtgttccccttgaccatgaacgcatgccgggccatgtcgatcatcggctgatcgaacttggagtcggtgtagaactcgtcgatgacggcgtccggaccgtacagttcgcggaaccgtttggtcttgttggtgttgaagttgaggtacgtgaccttcatcgtctccacatccacctcgctggccacgagattcctcacgccgagtctgcggcaggcctcccccaccgtcagaccgaaggatgcggtgaggatcacgtcatccggttcgggctggtaccagggcttgatgcgcgggtagttccggtcccagaaatcgtccacgagctgttcgacgctcgccacccgtttggatcggctcagttccgtgagatagccttcggtcatcttgcccacgccgtattccatctgttcaagcgtggcccggccaagcttgtatttgaccgcgtaccgcagcacgggggcgatatagcggaacactttcgggtcgtggcgggcggaatacaggtacaagtcgaacaggctttcgccatcatagatggttccgtcgaaatcgaatacgcgcataccttctgcttctactctgttattccttgtctaaggctaatctcggtaagccggcgaaagcgcaaatacgcagtgaatttcacatgaacactgttttttggattgatttcggtacaggtaacgtacactggtgacagcgtggaaggaggtgcgtaatggcgacgtctgaaatcgaacaatggtggattgataagtttcaggagaacctgggtccgattcgcaaggtagccggatggacgactcagcaactggccgacgagctgggagtcgcgcgacagacggtgtctaacttggagaccggcaaaagcccgatgaccaaactgcagtatctcgctttacgtacggtgttcagcgccgagatcgcacgtcgtgaagaccgcgatctggcacgcatcatcaagactttggtcgacgatcccattgagcaacgcattcgcgaacggcgcgcccaagagcaagacggcgaggccgttgccgacaatgccccagtcaatacaggctgtggcaacgctgccgacaacgccgccaccgagaaacgcaagcccagtgccgccacattgaaggcttcaaagactgccgcaacgggcaagcccacgctcagcacggcgatgcaggctctcgccgtcatcaccggcgcattggccagtggaaccgccgccggcatcatcacctacttgatgttcccggacggcggcccgaacaagcgctgagtcgccgaaatatcgaaacggattgaacaacccagttcgaagccctgagcaccattttgtccgtgtcgcaccagcgtttccctcattatcagctgtttcgagttgcatgaatgcaccgtttataggccgagaatttcgtgcttttttgcatcaaattcttcttgggagagaatgccaatatcaaccaattccttcatttttttcatcgcctcgacttgttcttccacagacatggatgccgtgtgagaggcgggagcagcggcttccggtgccggcgcaagtgccggcgcttgaaccggggcggccgtcataggattgatggcttgtgccatattcatgcccagcaacatgccaccatcgccaaagccgttgtcttgaataccttgcgcaatgcgctgctgggcagccatattgccagcttgctgggaaacgccctcgtatgcggcaacattcatcttattcgaggcgaactgctgcacgagttgacgtgattgctcggtgaactcgatactttcgatgcccacactggacacttcaaagccaaaacgatcattccacgtacccgcattggcccgatcgccacgcacgcatgctgcgatgtcattcgccttgccgggcaattgcgaaatacgatattcattggacaacgaattgatggccacaataaacgactgtacgaattcggacagaatctgcctacgtggcccttcatcatcgaatgaatacgacacggtagtggcaggcacaaagttacgaacgaatcgaactggatcagtgacctttagcgacatggatccgcgtgcgcgaatttctaaatcgacgccatagaaccggtcgttatacaccagcggcgcagaagtgccgaatttgatgccacgaatctcacgcaggttgacgaaggccacatatttggtgcggccaggctgacctccgaaggtgaatcgatcggcgacctggttgaagaacgatccgatgccgtctccggcgagcacgctctgttccccgttgcgatattcataaccgcccgactcggtgatgacgttttcgatacctgtttcagagaaaatgaacgccgcagtattctctggcacatagatacgcgaaccattggtgattattccctcggaaccgtattcattcgaaccgcgatcgttgttgcttccgcggggaatgcccggcacaacgacggtgtgttccgtgaacggaccagcggtgatgatatcacgccacaggtccgcgaatgtaccgccgagcgcgccggcgaacgccttaataactgccatctgttttcctcgatatctcaatgcacatggccggtcttgcgactatgcaatcgcaagaccggccgttatgctggcatgttggctatagctgcgtttcgcgatcgcagtattcgcatcgaacgacttctttgcgatgaccggaaagcggagcgccacaaccttcacaattcaccgaaaccacgggttcggtaatcccaagcccactacggaatgcgccaaaagtgtccttcagcgccccggccagagcctccgttccggggatggccttgttgaagaccggctcatccattggcgtatactgtctgccgcgtatacccatgtatcgtcatcgttcctttcttggaaaaccgttacctcgatacgccagtctgatcactggcccaccgatgcgagcttctgcgcgcatcgagtcatgacctcggtgtagtaggccgaatcctcactgctgagggagttttcgtcaatggcgtctaccttctgggagaactcagagtaacgcttcatcatgctggcatagtcggtagccatgctgaccacgttgtcggatttctgatatttgttcatgaaggcaacatactcatcgataaaggcctcgtagctgtccatcgtggacttgaagtcagcactgtcattggtgttctgctgcgccttctgatccgaagactggtcgctctgcttgttggcatcgctggaatcagcgcccgtatcagtgctcttatcatcctgcttcgcggcgtcgccgtccgtagacgtatcttccttcttctccggaacctggatagtgatggacatgatggtttcgtcgtcagtgtcacgagaaacgctcacactgtatccatcggcgttcttggcattgaaactgtcagcggacttgttatagtccacggtgaaaccgttgtcttgcacggacttgacgtagtcggcatactgcttggcgtcggtaccgcacacctcgatggagaaatagtccgaagactcgcttttaatttcaccctctgtggatttcggctgcggcagcagcgccgcgatatccgactccggccatgaatatgcttcgcacttggtggcgagcgatgcttccaattccgcccgatcagccttggccttcgcaccgtcacgaattacaaacacgccaccgattaccagacccacaacggtgataccgactgccacccaggccagcactcggccttgcaccttgccactcgggcgagtcacgtatacggcgaagcctgagagcagtgccggaagcaccgtggcgaacagcagtccgccccaggatcggccagaaacatccacaaattgggcgagtacgaacaacactccccatataatggcgaacacagccagcttggaagtcttcttcaccccttgcgcattcggagcaagcacggcaggcgcagcggcaccagcaaaaccagcggcagcaccggcaccgtgtgtggcaggtgcaggagccacaccaatacgcttgtccaaagaggcgaggagctcatcaacgcgcttggcgctttcgtttccagtcgcctccagacgaatggcggtcccagccgcaccctgcgggactacggttagcgtgcagttcactccatcgtaggagtggaaggaaaacgctccggtctgggtgttttcgttatccaaggtaaacgtggcgccagtagtcagctggtcgtgaataacttggaacagctgttgcggactgaccgcatatacacgatcgaatggcgcgccggcgggctgctgcggtgccgtagccggagtcatcggagtagtggtggccccatcagacgctacgtttggctggccagccggtacagcattcggcacggtaggcgcattgttcgcgcgatcttccggtgcgtcattcgtgccttcggacggtggaaccggctgaggttgttgatcaaatggcgttgtcatgatgcccttctttccttaagcagcagcattaccagcacagaagaggcaatcccggcaaccgttacggtcaatccgactgccatggcaagccggtatcgttcgctcatcattgcgtcccttcttattgctcgcgttgctctgcgatacatcgaaaccagtgtatggcgttgttattatgtacgcaaattagcattttgtattcatgttagctttattgtcgatgcttgataccgcgcatgaacatcctttccgccaccgcacctacacggatggcatcgaccattgtcgacgacacgcgcgggccatgcatcagctgacaactgaatttttcggcgtgtttccgaaaagtcggcgtcctgtacgctgggaatcgagcaaccgcgtacgatggcgcagcacagcacccgcaacacagcgacaaggagcatgggcaatggcagacatccccgaagaacatttgaccgaggaactgttggatcggctgctcgccagcgccagcattgagcagtatctcgatgagggactcgtcagcgcacgcacgctgaccgactatctgttcgaccgtatggaagcccatgacctgagacgagccgacgtggtgcgggcatccggcctcaacgccacagtggtttatgacattttctccggcaaaagccgccccggccgagatcacgccattatgctggcttttggtctcaagtgcacattacgtgaaacccaacggctacttcgtcttgcaggcgtttccgaactgtggtgcaaacagcgacgcgacgcgattatcatctggtgtatacgcaatggattcgaccgcattgccacggacgacgagttgtatcgtatgggagaggcgacgttgctaccggccgattgacgacattcggcccaacaacactcaccagtgagacgcaagtaagagggcatcaaggagagacatggacgataagcaggcgatgcatgcgatgagcatcgacgatgcgtaccatgtcgagcgtacgctcgctcgcggaccttccggcgtcaccgaactggtgagcattgacggcaacggcccgttcgtacgcaagaagattccctctcccctagcgcaacgcaatgtgtgggcggcgctcagcgcctgccagagtaatcgtctgccgcgtgtggaagcgacgtacgagctgcccgaccggttcgtcatcgtctacgattacgtgccgggcagcacgcttgcgcaaattgcggaggaaaacgggcggcttgcaccgaatgtggccgtgcagcttatcgaccaaatttgcgaagccgtgcaggagcttcaccagcacggcgttatccaccgcgacatcacgccggccaacgtcatcgtggcccaggatggcgcgcatctcatcgatttcggcatcgcgcgcatccggtcagaggcaagcaaccgttcacgggataccacggcgcttggcacctacggattcgcctcgcctgagcaatatggctttgccaaaaccgacgcgcgttccgacgtattctcgctgggccggctactcggattcatgctgaccggcgtatatcccgatgccagcgactacgagcagcgacttgccgatgatgccgcagtaccggctcgactacgcgccgtcatcggctatgcgtgcgcattcgagcccagcaaacggccacagagcgtccaagagtttcgccaggcgctgttctcccagtccaatccgcccataccgaacgcatcatcggcaaatccgccatcaacgagaacaacgaacggcagcgcgtcggcgtctcgactattccggcgtctgcacttgagcaaacgcgccatcgtgctgtggtccattgccggagcggcactgataatcgccgccattgcgggaggcattgtgttggcaggccaacttggcattatcgggtcggcaacatcacccgattcctcgacacaatccagcagccaatcaaccgataaggccgatggcgggcactcctcgaacgggtcaggaaccgacaatgccaatggcacgggcggagtagtcggcactgacggcgctgatggagacaatcaagacaccgtcaccgacaatcctctgaaaatagtggaatccggctggtcggcggaccagcaagggtatgtccactacgctttcgccctgcgcaacaccagtaagacccagcaggtgcagtatccgcagattaccattacggggcgggccaaagacggttccatcgtgttctcgcagacgcaagcactgaatatggcattcccgaatcagactgtatatgacgccggccaagcgggcgagggcacggccccggccaccgtagatttcgttgtgcttagccctgatacgtacaacgtcaccgaggctcaaggaaccgctaccttccccatcagcggaacatccaaaatagacaacagggacggcggcacgacgttcaatggcgaggtccgcgccacaacagacggattcaagccatccgatgggcagcaaatcaagatttccctagtactgcgcaacgcacagaacgcaatcatctatggagatatcacattcgtggattggccgggcaatggccgatccgcaccattctcgatcaccgtctacgatctaccgaagtatgcatcttacgatctgtatgcgcaaatagggtagttgactttgcgcctgcgaggtggctgtcaggcgactgtcaggcttgtgtccgagtcacctgtgcactggtgttgtggcgcgcctggccgaacagatagatgccgatgggcagagtcagcacaccgccgatgatgaacaccagcgaaatcgggatcacgtcggccaacggcgcgaagatcaacatacccagcggcatgctgagtgtgctcatggtggtgtcaaggccgaatacacggcccaccatcttctcatcggcctcggtctggatgatggtgcgcatcgggcccatgcagatggccgaagccaaaccgttcaccacatcaatcagcaaatacgccagcagattgtgaaccacgccaagaccaacgacggagacgcccaccagagtgatgccgaaggcgaccacgcgcatgttgttgcggatgagcttggcaccgatggtagacatcagcgcgccgccgagcagcataccgatgctccatcccagctcgttggcggcgagtttatcggaggcggtggtcaggttgatgaatccgagattcaaatcgatgccctcatattcgcgggtcatgagcaacagcgtaaggttcatcggcgccacggccacgaagcacaccaaggtgtcaccgagcaccacgttgcgcaggttcgcccggtgccatgtgtagctgaagccatctttcaagtcagcaaacacacgacggacgccggcaatcagcgaacgatcagcattggcatccgacatcggttcgagtgcgggttgcccgctattctccgcttcagccatacgcctcgcaacatgttccgcgctcttcttcggcgctttgatcaacgccacaaagccgacgccgataatggccgtggtcacatcgactaacagaatcgaccacagcggcactgtgttgataagcacagcagccaccgcaggtgccacaatcatatttgccgaattaatcacgccgtatattgagttgacgcgcaatagtttgcccgagggaacaacatccggtatgaacgactgcacagcgggcatctgcacaccgccgcccgccgaacgaatgaacagcaccacgaaaatcatggtcagactcacccatcccatcgcgaagctcagcgacagcacgacggtgaccacagcaatcaccatatccggcagcataatcagcaacttgcgactgtgacggtcggcccaggagccgccgaaaatcgagacgatcgcctgcggcatcacgccaaacaacgtggccagcagcatacccatgccgctgttcgtctgcatcacaatccaccaccagatggcatattgcacgatgttggagcccagcagtgagaacgcctggccagtgagtagaagcactacacggcggatccacgcacgctcggattcctcattggccactgctgcggcataggcggcaccgggtttgttcgcgctatggaccgctgcgcgcgcattcacattgtcatcgtcggaaacctcgggtgtttcgcgcacagttggttcagttgttttttgactagaagacatacgagtgttctcaattcttcaattccactacaaaggtcacatcacggcatacgcacgccgacgcgcgtatgcgtgcacgactccagcaacgagccgtacccgccgttagatggcagacttcagtatcgtgacgccatgcgttagcgtcaccatgcaacgataggaacacaccattcgatagtgtgtcatgaaggcgtgacgttgcccttgcgcaggtgccgtaagactccgcggacaaagcaatgaggcttcccccgcgagaagggaagcctcatattccattcattctattcagcgatgatggcgcctaatcaccgatcatcctttgggaacagcgcatcgaaggcatgttccatcacggacttacggcggatcacaccgacgagtctgccatcaccatccaccaccggcagtttcttgaactgcttcttggcgaggattcgggccacctctccgacatgctggtcgggcgtggcggcaacgaccttgcgcgtggcgatgtccatcaccttcttgccggagagcgcctgcaccttggaggccacggtttcgtcgtcgaacaccaccatcgtcgaaccggtgccggtggaaaccgtacgggattcataggtggcaatcgatttcatgacatcgccgtcgctgacgaagccgacgagcctgccatcgccgttcaccacgggaaggctggagacgttgaggcggatgaactcgcgcaccacatgcgtgatgtcatcgctgtccaggcagctgtagggctgatcgtccatgattccgccgatggactgttcctgggcctgcttgaacagggaggcggcgggggccacgtatgcgccggcgtagtgatgctcggcgggctggccttcagtggtttcggccgcgacttcggcggaggcttgcgcctcggaggccttggcgttgcgtgcggccttctccttggcacggctggtgacggtgaagatgcagatgatcagggcgaccagcgagatggcggcgcacagcaggtaggagaacgcgatgccgctggccgtggcggacttcacaccctgggacatgtgcgaggcggtcatagatgtttctgcggtgaccagaagcgaggtcgcaatggctgccgcgatctggcggcctgtgttggcgatggcgtttccatgggcgatcatgtcgttcggcaaagcgttgacgccccaagtgttgatcggcatgttggcgatagcctgaccggatgcctgcaatgcgcagaacacggcgacaaacagcactgatgtcctggtgttgatggtgccgagaagaccaagagagatggtcatgagcgcaaggccgccgatgcccacgccgcgagggccgaatttgtcgaatgcggcgccggcgaccggactcaggatgatgccgaccgccgcggcgggcagcatgaccatgccggtgacggtggcggattggccgagcacattctggatgaagataggcaacgtcacgttggttgcggcgactgcggcgttgatcagagtgaccagaatcacggagttgcggaagttgcgggtggcaagggtatcaacgcgcaacaatggctcatcgagcttgacttgcttgtatacgaatgcgacgaaggccacaagaccaacgacgattgagataatgacgaccggactgctccatcccatcgtggaagcggacgagaagccataaagcaggccaccgaacgcgatggtcgaaaggatcacggacaggatgttgagctttgggttcttcaactcgctgacgttcttgagcatcatcgtgcctccgacaaggatgaccagtgccacgactgcgatgccaatgaacatcgggcgccatccgaaactgtcaatcaccagaccaccgacaaccgggccgatagccgggccggcggccatgacgataccggccagtcccatggcggtgccgcgcttatccggcggatagacgagcatcggcactacggcgaccaatggcaacagcacgccggagccggcggattgcagtatgcgcccgacgagcaacagcatgaaattcggcgcgacggcacacagcagtgtgccgaccatgaaagtggcaagagctccggcgaagagctttcgggtggagaatttatcaatcagatagcctgaaatcggcaccatgatgcccgagaccagcatgtagacgctggtcacccactgcacggtgccggtggtgatattgaaatcacgcatcagtgccggcaaggccggtgacatgacggtctggttgagcagcgcgatgaacgagccgacgacgatcacacccacaacgatgaatcgggtgtgcggatcaataggctttacggaactggtggcggacccgagttccgcgtttttctgtgaggtcacagcatttccttctgttggtaacgtcatgtgtggcgatccggccccatgcttgtgtcaagacacgaggacaccgatgagtccggacgtaaaggaaaagccgccatccgttccgcattcatatacggcaaacgattcgcggctttgcgtaagttgatggctatggtgagcgattcatgcgacgtcgactgcggatgggccatcggtacatcccggcataaggcgtgtccccgctacaccagcatcgagaatagggccattcgtggattggcaaacagaacattgccgacgaacgacccacggcaggcgcgtgcgatgaacatcgcgtagcgatacaggttcatggcatctccttgatggggtcttcgtacggcagacatcgagaagcttatcatcattcaaatcgacggtgaaacccacgcatgcctgacaatacacaaaatcttcacaaaaggattgggcttaccgcatacgctccgcctgaataacggtccggggatgaatcaggggcgagctaagggttgcatctcgtgtttccgtcatgatttctggcaaaatagtgaagctgaacatgcgcggaatcgaccggaatcggaaagggactaatcatgcgagttctcggcaatatcctgtggatcattcttggtggattggccatcgcaatcggatgggcattggtgggactgattctgtgcatctccatcatcggcatcccgttcggcattcaagcgttcaagatggcgggactcaccttgacgccgtttggcaaaaccgtgcaatacggcggcggagtcggctctgccttggccaacatcctgtgggtggtgctggtcggctgctggatggcgctcggctatctgggtgcaggcgtgctcaactgcatcaccatcatcggcattccgttcggcatccagtcgttcaaaatggccaagctcgcgctctggccgttcggcgcacagatctacagtctgtaacaattgtttctgcagtaggtccggtgcagcgcattatcatcgtgcgttgcaccggacttttttatatacaacaggcatttcacacaccgtgatttgacggattcggacgtaagaccttatggtgtgcacaccatgattcaacacatcgcattcagcagcaacggcgtgaacgaacacgccaagcgtcagcagatgaacctgccggcgatgctcgaatgcgccttcaaacagggtttgcgcactgctcagttccagccaataaccggaaacaagcgcagcctgctcgctgccatacaaatctgatcagtacacctctcattggcgcatagctgaatcattgccggtgatatcgagccgactcgttcgcaccatgcctcataaacgcacctgcacgagcatgcgttcttggcatagtcgcaactcaatgcaccgcagcaaaacccattgcataccatcacatattcagaaagaacaacagatcatgaagtatttcactactgacacgcatttcgggcatccgctggtcagcgtgctgcgcggattcaccacgttcgaccctgggcacacgcagtatgacgctctcctctcctcgcagggacgcaaggccgccgaggattgggcgaagggcgtggtgcttgacgattcccggctcaatttccgcaaggccgcagacaccgatgcgcacgatgaagcaatcgtggccaatatcaatcggattgtcggcgaggacgacgagctatggattttgggcgatatcggataccgaacatcggtccggcatctgaagagctgcctgcgtcagctgcgctgcaggcatctgcacgcggttatcggcaatcacgatgactggtggctggacgatgcacccgcgcgagatctgttcgaatcgattgagccgaacagcacggcggagctgaccggtctcggaattggccgcccgcaggcaacggagaccgtcaatctatcgcatttcccctaccgtgaggatcttgcctatgactggccggatgatgccgtacgtttccgcgatcaggcattgccgttcgacggacatcgtctgctgtatggtcacacgcaccagctgtctccggagggcgcacgccacgaagccctcaacgttggactggacgcatggaatctgcaaccggtaagcgaaacacagattgccgactggttccatgcacacgcgaccgattcaacgcacgtatcaccgctggatatgcccgactcccccgggccggcgcccattgactccgccgcacagcaggaaccaggcggctcggtttcggcagccgaatcataatacaagcaatattggggcgagcagaaccttatgccatcgctggcacctgtctcgccccacagcacaacgaaaggagcttggctatggcaaagctcattattctgcgaggactgcccgcttcgggcaaatccacgtgggcacgctcatggtgtgaggaccccgccaacacgtggccgcattgcgtgatttctctcgatgacattcggatcatgatcgccggctcggcacaggtccgaaaccgactgcaatccgagcacggcaagcgattcaatgacatggtggttgccatgggacggcacatgattgccgacgcattggatgcggggtgggatgtggtggcggatgcgcaacacgctaatccccggtatgcagccgaactggcgctactcgctcaacgtcatggcgcactgtgggaaacgagggattttgacgttcctctagacgaattgttgcgtcgcaatgcggcgcgtgataccgctgaccgtgttccggaagattacattcgttcgtcctggaagcattttcacaccgcgatgttccgcccgttggaaccgggcgatccgaatggaaacctgttggagcgtatgcgcgcggatccttacgttcgggttattccggtgcgcggcgaaacagacgtgtatgcgtgcaatttcactgcagaggcatttcgtgaacatcggtggacggatcgcaccatcaatgcgcgagggctttttatcggcggcaacggtcaggtggtgcaacgcgggttcgagaagttctttgctgtggacgagacggaggggacatcgttcgcccaagtcgtcaatcacgctcaagaacatccagagtcgttgcccgtgcgcgttgagcgcaaggagaacggatttctcgggctcgtgggcgcggcgggaactcctggattgttccgcttctggtcgaagtcagggcaaacggattattccgcgcttatcgagcgcccgtttccttcagattcagcggtacgtgccgaattgtggcgtatgttgcatgagtggaatgtcacggcggcgtttgaagtcatcgatcgcgagtccgaccggcacatcgttggatacgaatcatccgggctgcgcttgctgcatctgattcgtaatgccgaatcgttctccatcgatgccgctcacgaggaaacgttcactcttgccggcggcttcgtgcggccggaaacggtggcgatctgccattcgccggaagaagtcgcccaggcaatcggcgaagccaaggcaagcccgcgtgaaggcgtggtgctatattttgccgacggttggatggtgaaggtgaagtcagaccggtacaagttggtcaaggcgatgcgccctcttatgcaacgcgtgctgctgcgtggtcgttccttcaacaagtccggcgacattgccgatttggctcgccgtatcatcgattacgcacacgaacaccacatcgacctggcctacgagcggcaggcattcggcgagcgcgatatcgatatgaccaaggtcaacgacatcgtggaccacgtgcggtgactgctgagttctagcgcaatatcttctgaccaacgtatgtatcacgaaggcatgtgtcgtgaaagcatgtattgcgctagaaccaaatcattctcgtggaggccggataatgaatctctatgctttgaacatgacgcaccatatgccggcatttccttgcgcgaacaactgttcattacgaacattgtactgatgccgttacagaacagaagagggtgctgtcctagcgccaaccatccgacccggttctgccaggcaccgaaccgattcgacaaggacgccgtgaaagacatcatgttcggacgggatgacacgaagaaggactccaacggagtgaccgtcatcccctattccaaactagacgagcgtgcacccgtggaactcgccgcataatccatctcaatactgcatacttgaaaccgcctatagctgctcttcgtaaacactgaggcggtttatcgtgtctctttgcgtctcgtcacgatgtttatcgcggagcgggcatcgccgacatccgcgacatctatgacaaggtcgtgctcgacgaaatcgatgagagcgatcagccggacggcgacctgttccggaaaggcgatgtggaaatacaggggccgcggggctggtcgtacagaccggaaaacgtccgctgaaaatacaggtggcgaaatcattgaggaatgttctcgccacaggagccgacgagaacgcggaagcctaagaaaagtacgcaaacatctcatctcaacgaggttcatgaaggttcgtaacatgaagaaaggtccgggcaaccaacactgctcggacctttccgcaacactccccctcagtcgctttcagcgacagctcccctcagagaggggagccgaggaaaactacttggaaacgttgaacttgaactccacaatatctccgtcggccatgacgtagtcgcggccctcctgacggagcttgccttcctccttgatcttggccatggagccgtcggcggccacgaaatcgtcgtaggagacgatgtcagccttgatgaagcccttttcgaagtcggtgtgaatcacgccggcggcctgcggggcggtccagcccttgtggatctgccaagcgcgcacttccttgacgcctgcagtcaggaaggtctgcagtccgaggatgtcgaagcccacgcgggccagctggtcgagaccggactcgctcaagccagcgtcggccagcatttcgcgggcgtccgcctcgtcgagctcggtcaggtccgcctcgaactgagcgttgaggaacacggccggagccggggccacggatgcggcgagcttagcctgcaggtccttgttggccagctcgttgtcgtccacgttgaacacgtagatgaacggcttggcggtcatcagatgcaggtcgtagacggaatccttgtcgaagcggccttcgcgtgcggccttgtcgagcgtctcgccggcttcaaggatggtctttgcctgcttgactgcgtccatgtaggccggctcgatcttcttgcccctcagatccttctccagcttgggcagcgcgttttcgatggtctgcaggtcggcgaggatcagctcggtgttgatggtgtcgatgtcgtcggccggatccaccttgccgttgacgtggacgatgtcatcgtcctcgaaggcgcgcacgacctcgcagatcgcgtccgcctcgcggatgttggccaggaacttgttgcccaggccttcgccttcggaggcgcccttgacgatgccggcgatgtccacgaaggtcaccgtggcgggcacgaccttttcggtgtggaccagcttggccagcacgggcaaacgcttgtccggcaatggtacgatgccggtgttcggctcgatggtggcgaacgggtagttttcggccagcacgttgttgcgggtcagtgcgttgaacatggtggacttgccgacgttgggcagtccgacgattccgatagtaagagacatggttccctagcttagtattaggcttcgatggcgtcgacggccttgatgaccgcaccgcggaacgcgctttcctccagcgaggtcacacccttgattgtggtgccgcccggcgagcagacggcgtccttcatgacgcccggatgggtttcgtttttgaggtatagcgcaccgacgccttccaccatcttcgcggctagacggtaggcggtggcacgttgcaggccgtatttcacgcccgcgtcgccgagcgcctcgatatacatgtcggtgaatgccggtgcgcagcctgcgatgcacatgccaatgcccatatgcgcggaatcaacgcgttcgatgaggctgatcgatgagaacagccgctcgaacacttcggcttgcgtgtcggtcagcgtgttgtcggcttcggtgacgagtacccccttgccgacggccatcggcgtgttcggaatggtgcattggatatgcgccgcgttgaaatcggcgccgaacaagtctcggtatttgtcaagatcccagcccgccgcgatggatacgacgaatttgtcttcgtcggcaatcgcgccgatgactggcttgatgacactttcgatttggtacggtttgatggcgatgacgaccatgtcggacgctgcgacgacttcggccgcgttgtgcaatggctttgcacccactttcatcgtggtcttttccagcttgtcgtaatgcgcggcgcaagccacgatgtcggcaccgtcgacggcgccggctgcgacgagtccttcggcgatggcctgcgccatattgccgtatccgatgaatccgatggttggattggacatggtgtcctccttgtcgtcttttctaatggacgtaattgttttggatgcgatggtttcggagaatttcgggaatgtcagaacagttcttccaggtctcccctgttcaacgcctcgtcgaacaggtgcttgaacaccacggaaccatgtacgccgtcgtgctcgaattcgttggtggtccaatagtgcgatcgtcccacacgggacagcgtatcgaattgcagaccggagtcgacgtacatgtcgtcaaaatagacggcagcctgcagcggaacctcattgcgcgccaactggtcggcatcgtagatcgtgccgaaatgcgtgtcttccataagcacgtccatggctggtttgaacggacgcaacgcacgttcctgctcgaacatccacgggaacatggcctcgccggtgaaattaagcggacgaatgtcacccgcgaattccggatgctcgccgcgcacgcgctgtgcggcccagcaaatcggcgcttccagctcaccgttggcgtagatgaactcctgcaacggccaatacagcgggcgagatgaagtcgcatccatcacggaagacaggaattcgtcagacagttccgccgaggtcgaggccgacccgtcgccgtcaaggaatgcctggtcaagaatccaatgcacgcgttcgaaactcggcttcatgccgaaatcggatcccaagcattggaagcgttccaccgtgagcggatcgccgttcggcaatgtgaccttgcgcgattgcagaatgtcggcgacggccgcggcacgttcgatatcgatcgggtaacgctcgtagaactgcttcgtctttgccgccatacgcgggaacgtatgacggtacacgtcggtcgcatcggcgggaacgtgcggaataccgcccgtagtgaagctgacgataaccccttgcgggaacagcgaaagatacgtcaacgtcaggaatccaccgtagctttgaccaagcgtgacccaacgtgcgcccccgaattcggtgcgacgcagatgctcgaaatcacgaacgatcgaatcagcgaggaaacgcttcaaaaacgcggcaccggccttgccatcgccatccatgccctcaatcacatgcgtgtcgacacgagacgaacgccccgtaccacgttgatccggcaacaccacgcggaaatgcttgatcgcttcctcgatccaaccatcggaacttgggccgagcggacgcggaccggaaccaccgggaccaccctgcaggaacacgagcaacggcaggtcgtcatgcacatgttcgggagcggtgaccacacggtagaacaggctgatcgattcgccatcgaacccatgaccgggctcgtgacccgcccaatccaacggcaccttgatggaacgatcctcaatatgcaatccgggcacgtagtattcgctcagcaacgtcatgcattcacctttcctttggcgtcatcggcatattcaatgcgggtagtgacttcttgatggattccatcccacccacacgcggagacaaccttacctcacaaaagcggctttatcttaccgttatttcattcctgcgcacgatggcgccacagcatatctggcgctagggtggagcgtatgtcgaatttcaagcagcgtttcctgtcgtggatgcatggtcatgtcttcgcaggcgatctcatcctcacgcttgttataggtgttctgctgttcggcgtgaccggcagcatcacctataatccgggattgctgtttgaccttaatccttccatacagatggcgtgggaagcggcaatgctgatcccgctgctgatccgtcgatggcggccacagaccggagcgttgctctgtgtggcattggccttgacgcatctcatattcggcccttgcatattgggcgccgatattctggcattgttcatgctgtattcggtgatcgtctacggcaatcccaaaaacacgaaagccttcattattttggcgttggccatcggtcttctggcttcggcgttgatggcatggaccatgaccaatgggccgctgctcaccggaggcaaagtgcatacatggagcagttggaatggctcaaatccaaatggcgcaatggtcacggaagacactctcggctccatctacacaggaacatccatgtcggaagtcgccgacatggtggcgcaatacatgctggtgctgacgccgattttcgaagtatgtatcatttccaccgtcattgtagcgttctggcagcgtgcccgtctgacaaccgttcgcatgatgcgggaacgcaatgaggcaatcgccgcgcgagaccaggacgaacgcgatatcgccgcgttggcggaacgagcacgcatcgcacgtgacatgcacgatgtggtggcgcacaccctatcaatcatcatcgtgcagtctgatggcggccgctatgcaggcacgcatgatcccgcggtggctagaaacaccatggagacgattcgacacgaatcggaacgcgcactgcatgacatgcaacgtcttctgggagtattcgggggttcaccgcacgccgattataacgatatcggcaatcttgtggaacaagcgcaaaacgtctcccccgacattcgaatccgacggaatatcaccggcaccgccagcccggaacaactcggcgaacaagcctcgatagcttcctaccatgtagtgcaggaggcactgacgaatatccgcaagtatgcggggccgcacgtcgatgtgcacattaaagagtcatggaacaacggtttgctcactttgaccatcaccgacaatggtcatggcgcggcggccaatatcgacgggcatacgccaggttacggcctgctgggcatgaaagaacgcatcgaatcggccggaggctcgttgcaggctggccctcaactcggcggaggcttcgaagtcatggccaccctgccttacggcggtaaagaacaggtgacagaagaaaccggcgaacagtatgcctcggaacagtccgaatcgtgcaacacaactgccatatccagcaaagcgaaattatccgacgaagcaatcgcacctcacacagtcgtcaacatatcggcgcgaatcccagatcagccatcggagcaaacgaaggaaaccaaccaaccgaccggtcgcgatcatcgttcgaatgccctgcaacatttgcgcatcaccgcacccaatctgcatgatttgctcaaatcattgaaactgaaatccgtagaacttgcaaatacatccaattcgcgagggctgaattgggtggaacgtgtttccgcgtggacgcagcgccattatgcgctcatggattccgttggtgccgtggcattggtcatgctgctgaatcgcatgtcggttacgttcttttttgatagttcacctcatgcgcagctctcaaatgcgatcgccgcatgctgcttgctggcgctggctcttcgacgcaggttccccgagacttgcgcgcttattgtgttcgtattgtcagttgtgcaattggtgtttttgggatcgattgaggttggacatatcgtagcgtcgctgtgtgcgctgtattcagccgtattgtatgggcgtgaacacgcatggcgttggaccggtcttgccgccgctacctgttcggtgctgatgggcttgaaaatcgcggctgatcaacacggatacactaccttgttcggcgccatcgccgcttttgcaggcttgacgaaaccggtttcagtcacgtcaagtactacggcggcgttctttaccggcgttatgtatacggttgcagtgctgatgctgtgcgccggcattatggcgtgggcacgttgggctcgttccagtgattcaaacgcactggtgttgcaggcgcgagaggaagcgctggtggccgagcaggagaagcagcgtattctcgcggcgaatatggaacgtgaccgtatcagtgccagcattcaggctgaagtcaccgccacgttgaacagcgtgattagtcaagccgtcgatggtatccgcatgctggatagcgccgaagcacaaggcaaagagcctaccgccgacgagatttccacagcgttcaaagccattggcgaacaggggcgcgccgcgcttaaacgtatgcgcgaactgcttggcgtgcttcgtgagactggtttcagcgatgacgctcatgccggtagcgcgaacgaactgcagttgaggcccgcagcaccgttggaggagcagctgcagcgcgcatctcaatagccgattcaagttttcagggagatttaagggtttgtttcgcgctgtgagcggaacaatgccgataaggtggagagtatgagtgaagaacagaagattcgtgtggtcattgccgatgatcaggaattggtacgtgccggtttcgccatggtgatcgggtcccaacctgatatggcggttgcggcgcaggctcgcgatggtgcagaggctgtggcgttggcggaaacactgcatcctgacgtggtgttgatggatgtgcgtatgcccggcatggatggtattgaggcgactcggcagatcagttcgttgcagcatcgctttgctgccgatggaacgcaatcagaagtcgcccgtaccaaagtgatcattctgacgacattcgatttggatgaatatgttatggctgcgatcactgccggagcttccggttttctgctgaaagatacggaaccggaaacgttgttgaattcgattcgcacggtttttcaaggtaatgcgattatcgcaccgtccgccacgaaacgtcttatcgagaaaatgatggaaggcgatttcatggctgcgaatgttggcgcacatggaaattccactgcttcttccacttctgattcgacgtacaccgatccggaattagatgaactgaccgatcgcgagcgcgaagtgcttattgagatcgcgcatggattgtcgaatcaggagattgccgacaagcttttcatcagcctgccgacggtgaaaacgcatgtggcgcatattctggcgaaaatcaatgcacgtgaccgtgtgcaggcggtggtgttcgcttacgaaaaccatttggtctgattgatttgttgttttgcgtatgcatgatacgcgaaaaggactcctgccatgtttgtggcaggagtccttttcgttgtgtttgctatgaagcttaggcttcggcgagcgcctcaacaggaggcgtgctcactgccctgcgtgcggggaatacgctggcgagcaatgctgccacggctgccacggcgagtacgatgccgttaatgccccattcgaacgggaacaccactttgccgtacatactgaacaccacgtatgcgcccagccagccgaacagggtgccaagtagtacgcccgcgatgccggataccagcgagatgagcagggcttccaccgcgagggagcgtcgcagctggcctcgggtcatgccgatggcgcgcaatgtggcggattctcgggtgcgttcgatcactgacagcgacagcgtgttggccacgccgacaagtgcgatgagcacggccacggcgatcaatcccaccagaagcatcatcatggagtcgatcatgttcgcccatacgatgcgttcggcgatcggtccggtcactgtcgcatcagcgctcttctccaatgcggcctgcatgtcgttgtagatgccgtcaacggaaactcctgacttgtcagtatctgccttgaccagcaacacatgggtggcggcatcgaggtcaccattggtgaaatggctttcatccacgaatccgacagctccatactgtgcggatacgcgacggtagtcagcttggtttgcttgcaatgtcagcgaacgcgtagtgacgccgtcctgattccattcggtggagaaatcagccgtgccattggcgaactgcagttccttgccggtttgcgcattgtatgttggcatgagcacgctatcactgtcgatggaggcgttacccaagttggcacgcatgacctgcttgacctgatcgatgttcttcacaccgaccagcaatgcggacgtaggctgggttccatccgctttctccaaggtcacggaaaccgccggcgcatacaatgtgtcggacacgccgttgatgtcggctacatccttggccatttgctggctgatgtcatcgcccatggccacgatgtcgacgctataacgggtggcgagcgcaccattcatagtctctttggcgctagcggcaccggttgcgatggtggaaaccagggtgacgccgatgagcagagcggcaccggttgctgcgatgcgtcgcggattcttctgaatgttggcgtgcgcaaccgttgcggaagggcctgtcagcgaggccaacgctccaacgcccttcatgagggccggcatccagaacaccgcggtgactatcatgccgaggaacaccagtgcggcgccggcgatggctacgagcagaatcatcgtgaattgatcactgctcgcatcctcgccgccattggtggcttgtacctgccagatggaaaataccgccatggtgataccgaccaccaccatcagaatgccgattatggctcgtgtgaggctggaacgacggttgtcggtcagttcgatcgggcgcaatgcctccaatggtgtcaccgcagtagcggaacgtgcggatcccaaggatgcgagcaccgtcaccacaataccgaaaagaatgggtacgacggcggcttgccaagagaaattgaatcgcataccctcttgcatgatgtcgctgacgcacatgccccacatgagcaggcttcccagcaccacgccaagcacggatgcgacgaagccaagcactgccgcttcggacagcacggaaccatacagctggccttttttcgcgccgatggtgcgcagcaaggcgagtgtgcggcggcgttgcgccacgagtacttggaacgtgttggcgatcaccagtgccgccacgaacatggcaagcacgccgaagcacataaggaatgtggtggcgatgttggtttggttgccgcttaaggatttgatgctttcgtcactgatttgctgtcgtgacatcagatcgaaatgctttggcagcaacgctttcacaccgttgatggtttttgcggatacgctgtttccatccaaggcaaggtcgagatacaccattgttgttccggtggcgttgaaatcgtccactccctgcattgcggcaagcagattgttggatcctacgatcgcaccaccatagtatgagtaggcgccgttcggatcggatgtgagtcctaccacgcgcacgttgtccgccttggctttgccatcgtcgcctaccgcatatcgggaggtcaggcttacagtgtctccaacgccgacgttcaactgtttcgccatgtcttccggcagcgcgacttcgttggaatccttcggctggtccccttccgtgatattcacggggagcatgttcttctgtgccgcggtggagatgatctcgccgctgatggtgctgtctcccttggaaacgctggcgccggtttccaccgaggcgcggatgccgtcgactccttcgatgccggcgatctggtcgagatggaagtcgccgacagtgctggagtacgcctcgttgagttccttatcgctcaggtcggagctgttgacggtcaccgcatagttggcgtttccgaacatggcggtcagccgccgtgtcagggagtcgttcatggcattgccgaacaggaaggtgctggcgatgaacgccgtgccgatcatgatggcgatgcctgcgggtatgagcatgcgcttggtttttcgcatgagtttcaaagtgatggaccacatggtgaattctgttcccttcttcgaatgcttctacagtgcgtttagcgggaatgtctcgcggaagccacattcattgtggcggcctcacgttccttcatcagcagttcactcatctggtctgccgtcggcttgtttacgtccgccgcgatctggccgtcggcgaacacgagcgcacggtcggcgtaagacgcggcgaccgcatcatgcgtgaccatgacgatggtctgtccgagttcgttgaccgaacgcttcaggaagccgagcacttcggcgctggagacggagtcgaggttgccggtcggctcgtcggcgaacaccagcttcggcttggtaatcagcgcgcgggcgatggccacgcgctgctgctggccaccggacagctcgttcggacgatggttgagccgttgcttgagtcccaaggtttctacgagcagatcgaaccaggcacggtcgggcttatcaccggccaaagtcagcggcatgaggatgttctgctctgcggtgaacatgggcaacaggttgaagctttggaagatgaagccgatcttgtggcgacgtagcaaggtgagctgcttgtcgtccatgcgggtcaggtcggcgccgccgaacaagatatggccggaagtggcggagtcgagaccggcgagcgtgtgcatcagcgtggatttgccggaaccggatgggcccatgatggcggtgaatttgccgcgttcgaaactcacgttcacgccgcgcagggcgtgaaccatattgctgccggtgccgtagttcttgaccaagtcgacggcctgaataacgatgccgcgcgatgcggacgggttctgcacgttcataatgcctctccatattgggccgggccttatgcccggatgatgattccaacttatgaagaaataacggcgcgccccatcgtgcgccagactgaattgggcggtcggccacgcgccggccctcatccttgaggattatgtcgtctcaggtctcacactattcatgcctctgcgcaaacagtgtgaggcatacagacgcaagaaagcccgcactgcatgacgtcagtgcgagctttctactccttgagtcaagttatcggacggaaggcaccccatgcggctcgatgattcgcgatgcaccccattagcatcgcgccccttctcatcgggccgtcaaccctcctgtcgacctcacttggccaagccggaagcgcgaagggcctcgaagccgcccttcaggtcatcgagaatgtcctcgatgttctcggtgccgatggacaggcggatggtgccctggtgaatgccctggtcctcgagctcttccagggtctcctgggagtgcgtagtggaagccgggtggatgacgagggactttgcgtcggccacattggccagcagagagaacaggtgcagattgtcgatgaagacgcgagccgcatcctttccgcccttgatatcgaaggtgaagatggagcctgctccgttcgggaagtacttctcgtacaggtcgtgatccggacggcccgggatggacgggtgggagacggactcgacttccggcacggtctgcaggtactcgacgaccttcagagcgttctggacgtggcgctcgacgcgcagggacagggtttcggtgccctgcagcagcaggaaggcggcgaatggagacagggtggcgccggtgtcgcgcagcagaatggcgcggacgcgggtcacgaaggcggcaccgccgagagcctcgtagaagttcaggccgtggtaggaggggtccggctcggtcagggtcgggaacttgcccggcacctcggcccagttgaacttgccgccttcgacgatcacaccgccgagggtggtgccgtggccgccgatgaacttggtggcggactcgaccaccacgtcggcgccgtgctccagcgggcggaacaggtacggagtggcgaaggtgttgtccacgatcaccggcaggtgatgcttgtgggcgatttcggagattgcctcgaagtccggcagatcagcgttcgggttgccgaaggtctcgaagtagacgagcttggtgttctcctggatggcgtcctcgaactcctgcgggttctcggcggaaacgaaggtggtggtgatgccgtcacgcggcagggtgtggcgcagcaggttgaaggttccaccgtagatgttcttggcggcgacgatgtggtcaccggactgggtgatattacgcacagcgtattcaacggcagcggcaccggaagcgacggccagaccagcggtaccaccttcaagggcggcgatgcggtcctcgaagacaccctgggtggtgttggtcaaacggccgtagatgttgcccgggtcagcgagaccgaagcgagcctcggcgtggtcgaagttgtggaagacgtagctggtggtggcgtagatcgggactgcacgggagtcggtggccgggtcggcctgctcctggcccacatgcagctgcagggtttcaaaacggtacttcttgttgttctcggccatgggtctttctccttggttgtgctaggtcgcgaggatttttccttgccacccgcctgccgtgttcgggcggttggcgaggtgttggttatgaagttacgacgcttgggccgcgcggcgcaagctgaacgttatcgggcttgcctatagacccttataaacccttggaatcattgggatatgaggcggttacgtcgggcaaaatagtcatcaaaaatctcacgacacgccgagacacttccacgtctcttcgcgacagaaatctaggaaatcatcctcaatttcctgaaatcctgtcactgaggtgacgtcagcgacagaatttcaggacgaatgggatgatttccgaaatttctgtcgctcagatggaaccagcaacggaattttggggtggatggttttatttccaagatttctgtcgctaggagtttgagcgatctgttgaattcggcgacggaacctcaccagatgaataccggttagcgtgtccgtatccctacagactagtgtcaactgtgattatgtgacatccgtctgattgattggagttttctagtgtccgacgttacgttgtacgaccgcgatccgaagtacatcccgcgcgtggccgccgtgcacgacatgtgcggctacggcaagtgctcgctgaccgccgcgattccgattctctcggccgccggctgcgatgtgtgcccggtgccgaccgccctgttctcggcgcacacacgctatgcagtgttcacgttccatgacaccacggatattctctccggttacttggatgcctggcagaaggaagacgtggagctggatggcgtgtattcaggcttcctcggctcccccgatcaggtggcgatcattcagcgtctctaccgcgaatatccgaacgcgctgcgtctggttgacccggtgatgggagacgccggcgaaatgtaccccacgtacacaccggagctgtgcgaggcaatgggcgcgctggccgatggtgccgacgtgttgatgccgaacctcaccgaagcaagcattctcaccaagcgtgactatcctggccaggatattgatgaggccacggttaacgagctgcttggtgctctgctggagttgggtgccaagaacgtggtgctgaagggcattgaccatggcgatggcaaaatcgtcaactatgtggccagcgcttccaccggtgttgccggcaagatcgagctggctcatgagaagttgccatacatgattcatggcacgggtgacgccttcgcctctgccctgtgcggcgcggtgatggccggccgcggcctggccgagtcggccgaaatcgccggtgagttcgtgcgtcacgccatggtcagcacccgtaaccagccgcatttcgaggatcgtggcgtcagtttcgaactgaaccttggcgaactcaccgatttggtgaagtgaccgcaccttggctcccctctccgctcactgggtctgacgtattcagcgaacaatccgatgggttgttttttcgtcacagggaagtcgactggtgagccttggtaaaccttctgaactaatggtggataaccgagttttcatccacacgttatccacaacacgccaaaccgcgtcatagtatccacatttgccggttgcgcttgtgctcttacataagtaacccgcacagtggaatcatgaacgctttaccacctactcagccgacgacgaagtccggcatcgacgccggtcttgcctttcaccagcccatgctggcttcacctgatccgcaggcaatgctgccttcggaacggattgcggccacgatgggcgaccgcaatctgacgcccaaacagttcggcgcgctcggcgagcagtatgccgccgcgtggctggaggaacacggttggacgaccttgagccgcaattggcatacccgttacggcgaattggacatcgtgatgctcaatcccgagtacacggtggtgttcgtcgaagtgaaatcacgccggtccatgcattacggatatccgcaagaggccattacgccggcgaaacagcacaatctcaggaaagccgcctgcgattggctacttgaccggcgtaatcgggtgccgcattcggcggtccgtttcgatgtcgtcaccatcgtgcttcgggtgggcaggccgctcgtgcatcacattgaaaatgccttctgaagcccccccccaaaaaaaaacagccacgttgcgaaacacattgtgaaaggagtagacatggctatcggcagcaccctctcagtcggactgatcggccttaaggccttcatcgtccaagtgcaggctttcatcagccctggcttgccatacttcagcatcatcggattgccggatgcatcgttgtccgaagcccgcgagcgcgtgaaatcagcgtgtcaagccactggattcggttggccgcaaacccgtgtgaccgtgaacatgagccctgcggccatgcccaaacgcggttcgtcgcatgatctggccatcgcggccagcgtcctatgtgcggcgggtgccatagggcatgattgcctagaagataccattgtgctcggcgaagtgaatcttgacggctcggtgctgccgattcatgggctgctcccgatcatgctgcatgccgaggaacgtggcgtgcgcaaaatgattgttccccatcgcaatcttgacgaggcttcgatggtggatggactggatgtagtgggcgtgaggcatgtgggtgagctcatcgaactgatgggcggcgatgccacctatacgattcccgatacaccggttaccgacgagaccaccacggatcaatcgcccacaagtcatcccaacgattgtggcgatatgaacgaggttctaggtcaggagcatgccaaatgggcactgcaagtggcggcggcaggcgggcataatctcatcatgaccggcccgccaggcagcggcaaaaccatgttggcctcacgtatgcccggcatcatgtgcccgttgaacgaggcggaacagctggaggtggcatcgattcgatcgctgtgcggcatactgcctcagtacggcatcaccgacatgccgccgttcgaggcaccgcaccacaccgccagcacggcggccttggtgggtggtggcagcggcatcgccgttcccggcgcaatcacacgcgcgcatcgaggcattctgtttctggacgaggcaccggaattcagcgcacgcgccctgcagacgttgcgcgaaccattggaatccgggtatgtggcgctttcccgttcaaaaggcagcacctactacccggcctcattccaactcatcatggcggccaacccctgtccgtgcggatactattacggcaccggcgaacgttgcgcttgccgggaaaaagaccgtatacgttatttctcgcgattgtccggaccgatactggatcgtgtggatattcagatggcggtgccaccagtctcgcgcattgccgcgcaaagcgagccaatcggcgagtccagtgccgggatacaagctcgtgtgattcgtgcccgtcaagtggccaaagaccggttcagacagtatggatgggtgtgcaacgcgcaagcttcgggcaaatggctgcacgccaatacatcgctgaaagcgatggaattggtcaatcgggccctgtccaatcatcaactcacattgcgcggggctgatcgcgccatgcgtctgtcttggacgctcgccgatctggccggccgcgtatcccccactgaacaggacgtccatcagggcatcgaaatgagaacgaggatgacatgagtaacgctactgatatccggcaatctggcggcaccgcaggaagtgtggatcacaccgatacgagtctcgccgtttcgcgcactattcccgtacctcccacggatacgttgtatcgtgccgcgctcacgttctgtcttgatggcgcggatgtgatgatgtacgccacgctcaaaggcgcggaaaacgccgaatccctctggcatgcgttggcgcaatcccatccaagccagccatctgaaatctgcggcccggcgctgtcacgtattgaccgcatgttcgtggacggcctcactcgatggggccgcaaggcgtcggcgaacgcgatgcgctccttccgcaatgcactggcctgctggcataaccgcatgatggacctgccctcgcaagacatcatccaactggccgactggttcactatggatggcacgcaatggattatcggccctggccatccatgttggccctcgcagttggccgacctgtccattcgctccgattgggcgccaccgctgtgtttgtggatcaaaggcgatccacgcgcattgaccagttgcgccaaaccggtcggcatcgtcggttcacgggacgtgaccgaatatggccggtatgtggcacacaccgtagccgaacaggcagccgttgccgggcatctggtcgtgtccggaggcgcgatgggcacggatgcggcggcacattggggagcgttgaatgcgctgcacggcagaatgcccgccaatgtgggcaaaaccgttgccgtattcgccggcgggctcaaccatatcggaccgatgcgtaaccgcacgctgttcgaacgcatcgaggcgcagggtggtgcactgatcagtgaactgtgccccgggacgattcccgaagcccgtcgttttctgcttcgcaaccgcattatcgcggccatgtcttccacattgattgtgacgcaagcccggttgcgttccggagcgctcaacaccgcgggatgggcatgcgaattgctgcgcgaagtgtatgcggttcccggtgacatcaatcagccttgcaacgccgggtgcaataagatgatcggcgaccaccgagcgatgattctgtgtgccgccacatccaccgaggatatatgccatgaacggcataagcccgttatggcagcatacccaggcatatcgaaatccacaggtcaggactcgtccgaaaacgaggaggccatggaagtgccggcaacgactccgttatcgccagcatcctcggaatcatcggtgtcacaggagtcgtcacaagattcaggtcattcgaaacgttcgaagaccaagcatactcagcctacgcgcactcaatccaaggatgggccggcgagcgcaactgccgattccggtaacgacaaaagcaagggtgaagagcttccctcgtcgcatcagatgccggatcttcgtgtcaagccgaagcccgatcccgagaaggaagcccaacaacgtatcattatcgccaagctgccggaaatggaacgcacattagtggcattgattcgtgaatgccgtaaacgacatctcatcgtcaccccggacgcactattgcgtgtggcgcgagagacggtacccgacgagattcccaatatcggcaccatacttgagctactcggcgcattggagctgaagggagtgatcgagcgggatgccggcatactcaagctgagcagccgtgtcggctaatcggcttccatgacacggctcgaaggctgttcggcgggtgtgcgagaatcgaacccatgagtccgaaacgtttggaagatatgtatgatgcggtgatcgtcggcgccggagcggccggcctgtcggcggcgttgggactgctgcgctcccccgagatcaccgagctcaaggaacaaggcgtggacccgaagatcctcgtggtctccaaactgcagccgctgcgttcgcacaccggttcagccgagggcggcatcgccgcgagcctgggcaatgtggagtccgatgactggcactggcattactacgacaccatcaagggcggcgactggctggtggaccaggatgcggccaaactgctcgccgaatacgcgccgcagaccgtgatcaacctggagcgtcagggcgtggccttctcccgtaccgaggacgggcatatcgcccagcgccggttcggcggccacacgcgcgagttcggcggcgccccggtcaagcgcgccgcctatgcggccgaccgcatcggccaccagattctgcacgccttgtggcagcagtgcgtggccgccggcgtcgagttcgccgaggaatggtatgtgaccgacctggtgctcgccgacgacggcaagcaggcggccggcatcgtggcctttgacacgcattcgggcaagattcaggccatccacgcgcgcaacgtgctgcttgccaccggtggcgcgggccgactgttccacaccacgtcaaattcctgggatctgaccggcgacggcatggccttgaccttggccgccggtctgcagctggaggacatcgaatttgtgcagttccaccccaccgggctcgcgcacaccggcatcctgctgtccgaggcggcccgcgccgagggcggcattctgaggaacgccgacggtgagccgtttatggaacgctacgctccggagcataaggatctggccgcacgagacgtggtctcccgctccatcatggcggagatcgacgccggtcgcggcgtcgccgacccgaaggacccggatggtccgaaggactgcgtctggctggatatgaccggcatcgaccccgaacgtatgaaggaagtgctgccgcaggtggtcgaaaccatcgagcagtacgcgaacctcgatccggccaaggacctagtacccatcaagcccactgcacactacacgatgggcggcatccccatcaccaccgacggcgaggtgtaccgttgggccgacggtgccgtgcaggtagtcgatggactgttcgccgctggcgaatgctcttgtgtctccgtacatggtgcgaatcgtctgggcggcaattctctgctcgacgcctgcctgttcggcacacgcgctggtcagacgatggccgcacgcatcgccgagaacccggttgactcccccatggccgatgattcggccgatgacatgctgaccgatgccgccgatcaggctgccgattctcgcaaagcggagcttgacgaactgctcgccgggccaatagatgattcagacgatggagtgcccaccgccaatccttatcagctcatggcccaactcggatcagtgatggagcaggctctggccgtacgttgcaccgctcagaccatcgatacggcgttgacccagatcaacggtgacatcacaccggttgccgataccttgcgggcccatgacaagaccgccgctttcaatcaggaggtcaccgccatctgggaagtccgtcatctgatcgaactggccgaggtcatgctgcacgcttccgaatcccgtcaggaatctcgcggatccatgcaacgccttgatttccccgaacgcgacgatgagcatttccttgctcactcgatggtcgccgatgatggttcggtaagtttcaagccggtgcacatcaccgactatccgcccaagaagcgcgagtactgatccgctggtggtaatacccaagccgcctagggcttgtggcacaataggttggctaatattggacttgacatcccactgtttcatggaggcagaacatggctgaggcgagcaacacgacggttaccctgcaagtgcatcgtttcacgccgcgacccgagcgtgccgaacgtgcacgcggtggcagcccgtttgccaagaaaggctccccgttcggcggcggctcggattcggcggcgcgccgtcgtccgcgcggcaagcagtgggtgcaggagtacacgattcccgcgcgcccttcggatactgtgttggattgtctgctgaccatcaaacgcaccgtcgacccgacgctggccttccgttattcgtgcggtcatggcatgtgcggttcggacgccgtggccatcaacggcacccccaccctgctgtgcacagccaccatccgcgattgggccaagcaacccggcgccatgcccgaagtcgatgacgaagggttccgacacaccggcaccgaggctgaggaatccgacgattccgcggaaaacgtcgcaaacgcggcggccgcccagaactcagccgcaaacggttcgctgggagtcatcgaactggcgtccctgcccggcttcccgccgcagcgcgacctcatcgccgacatcgaccctatgctcaaccagatcaggaagctcaccccgtatcttcaggcggacggcgtgctcgccaccaccgccgaaggcaaggtggacgtgttcgaatacctgcagaaccccgaacaactcgccaaatacgagctgctgagcaactgcatcgcctgcggcgtgtgcgaaggcgcctgcccggtgtacgccggcggcgacgccttcatcggcccggccgcgctgatttgggcctcccgtttcgtcaacgattcgcgcgacaccaaggccatggagcgtatggatgccatcgacaccgccgacggcgtggccgcctgccagtccgtgcgcgcctgctcccgccactgcccgcgcggcatcgatgtgggcgaggagatgtggcagatcgtggctaaggtccgcgagcgctaagccgcgccgcggctggctgcggcgatcgcctaagcacatgcgtcgatgcatccgctgggtgcccgcacgagagaagacatgaaagaacgaattatggacagaacgcagtacaccaacctcgccaaggcatgggaattcaccgaggaacacgcgcgcgaacgtgaatccgatgcgttgaccgacacccgtacggccgccgacgagtccggccagttgcagggttcggcggcgcaggcccgtctgctgggcatgctggtgcgcatcaccggcgccgcttcggtgattgccgtgggcaccggctcgctggtggagaccttgcagctcgcccatgcactggataacaagggcctgctgactgcggtcgattccaccgcccagggcatcgcgctgattcgcaaggcgttcgccgagctgcaggacgagaccgacaccacgttgcgtgcggtgaacgccccggccagcgtgtttctgccgcgcctcaacgccaatgattacgatctgatcgtggtggcgggcgacgccgagaactatgccgccacgttcgcccaggcctcccgtctgctgcgcgtgcacggcgtgatcgtgttcaccgatgtgctggcgttggaggacggtcagggcggcgtgatcaatccggccgaccgcagcgacaaggccatcgccatgcgtgagctgctcaccaccgtcgaagatgacgaaggtttcgagtccacgctcacccctgacggcaccggcctgctcatcgcctacaaaaagtaactctgtccttggctcccctctccgaggggagccactctatctcgcttacctcacaattgcgctgacggccacgtccacggcttcgtcggcgtcatcggttacggtgaccagtttcgggtcgatcgtcgagatcatgccatgctcggccaccggaccgttgagccagtcaaagagcccctgccagtattccttgccgtagagcaccaccggaatattcgccaccttgtgcgtctgcaccaaggtcaacagctcgaacatctcatccagtgtgccgaagccgcccgggcatacgatcacgccggaggaatacttgatgaacatggttttccgcacaaagaagtaccggaagctcatgccgaggttcacccactggttcaacccctgctcgtgcggcaattcgatgccaagtcccaccgatttgccgccggccagtgccgctcccctattcgcggcttccatgatgccgggaccaccgccggtgatgacggcgatgttgcgcttggctatctggctacccatgcgccgtgctgccttgtagatcgattcggtgcgctgggtgcgtgcggagccgaaaatagagaccgcaggtccgagctcggcgagcgccccgaaaccgtccacgaattccgattggatgcgcagcacacgccatgggtccatgtgcagccagtcggtgtcctgatcggatttcagcaggttggcggtggtgttgtccgagggaatcatctggccgcgtagaatcaccgggccgcgatgataggtgtcgcccagcggcgaggcgtcctccagatcgaccgagttcaccggtgtggccacagcctcagttgccgtctcagccgccaacgccgccgcatcattcgcggctgtggcttccaatggttccatatcgtccacgactgcggacttggatgcgacctcggctagattctttgcttcagcggcctttttgccgtcgttcttcttggatttcttctgcttctttgccatccaatgtcctcctgtacggcgctatcgactcttcgcattctagcgcctgaagctctgcgtacgttttccgcgaaatcatccttgacttcgtgaagaacgtacggtgagtgacactgagcgtacgttttccgcgaaataaggcctcatctcgtgaagaacgtacggtgagcgcgtctcagcgtacggttttcacgaaacaaggccaacaatggagtagggaccgtctaagccatcagtggcggaagtcgatttccacactggcggtgccgtcggcgagggtgccggggtgttccgtgggcgtggtgggctctgtggtgtggcttggctgcccgatgccatcaccatcaatcgattcgtcatcctcctcatcagccgctgctgcggctgcggtcttctcgaatcgcttggactgacggctcagcagcacaccggaaatcgcggcggcgatcagggaggccaccagcacgccgaagcgcgcctcagcggaaagttccgcgttcttgtacgccagcgaagcgatgaggaaggacacagtgaagccaatgccgcaagcgacggcagcaggaatcatgtcgcgcacacgcagccccttggccatcttgagcccgcccacatgcgtggacagccatgcggtggtgatgatacccagaggtttgccgaccaccaaagccacaatcagtgcgatgaccagcggcgaggccaacaatagcgggctcatcgactcgaagtgtacgccggtggcgaacaaggcgaagatgggcagggccagcagtgcggagaatggctggagcttgttggcatagcgttcggcacgcggcgagagttcgccgtgcatttcacgagagggggtcagcaggccaaccagcacgccggccagtgtggggtgcacgcctgcctcgaacatcatgatccaagcgaggataccgacgatgccaaccgcgatccacggcacttttttcagtcgtacgaggtatgcccagatggcggcgcatacggcgatgccgatgaaccaataccaggcgttaatcgaggagaagaatacggcgatcagaataatggccagcaggtcgtcgacggtggcaagcgtcatcaggaacgcgcggatcgaaccgggcagggccttggcgaacagggcgagcacggccagcgagaacgcgatatccgtggcggtgggcactgcccagccgtgcgacatctccgagaacgggatgctgctgccggtggtggtcagaatcagcgtgccgggttcaccaggcccgatctgagagaacaatgccgtgacggccaggaacaggatgggcggggcgatcatgccgcccaccgcgcacagcatcggcacggcggccgctttcggattggcaagcgagccggtggtgagttcctgcttcagttcgaggcccacggtcaggaagaagatggtaagcagaccatcctgggcccagtggccaataggcaggtcgagattggtgtaggggatgaacagatgcgtttccgctacggtctcgaacgcatgcgcggtggcgggcagattcgcgagcaccaggccggtgagcgcgaagccaagcatgatgagtccggaaatacggtctgaggcggcgattcgcctgatggtggaccaaagtcccttcttcgcgccggcggtcgtggccatcgcgtctccttgctgcactctcttggatgaaccgtatgtaatagtacggaatatctcaggacgttccgctccgggctgagtcgcgaagggcaaccttagcccaaccctgtgtggccgactcaaccgactcaaacgggccaatacaattggaaaagcctcggaagcatttcgctttcgaggcttactgtgcgccagacaggattcgaacctgcgacctgctgatccgtagtcagctgctctaatccgctgggctactggcgcataccactgttgtccccgtggttcgggagtgcgccagacaggattcgaacctgcgacctgctgatccgtagtcagctgctctaatccgctgggctactggcgcatgttgtctttcagacaactcgatatataatacacgccgttcagctgaatgcaactcggcgtgttgcggcgagtcgcattcatcttaatcgccgccgcaacggcgtatttactggcctcacgcctcgtgtgtacggactcggtcaagcaaaaccgactgcgcaactttgagacgtccctgcggcacatccacggcttcgcgcaggagtttgggcgtgctggaaccctctacggacgccttgtccacaatcacctgcctcacatcatccaaactcggcaactggaacatcgtgtcctgcaacgtacgttcgataatcgaacgcaacccgcgtgcgccggtcccttgcttgatagcgatatcagcaatcgcccgaatggcctgttctgtgaattgcagatcgacgccgtcgacggcgaacagtttacggtactgcttgatcagcgcgttggctggctgggtgagaatcgccgtcagatcgtctacggtaagttccttcagcacactggtgaccggcaaacgtccgatgaactcaggcaacagtccgaactcggccagatcatcggcattgacctgttcgagcaattcctcgtctttcatgtcggcgtcgtgccaattcgcgccgaagccggtctctcgacggcccaatcgcttgcgaacaatgtccgtcagccccacgaacgcaccgccgcagatgaataggatgccgcgtgtgtccatctgcgcaacgtcctgctccttatgcttgcgcgtgccctccaacggcacggaggcgatggttccttccaagatcttcagcaacgcctgctgaacgccctcaccggacacgtcacgggtgatggaggtgttctcaccggatttgcgggcgatcttatcgatttcgtcaatgtagatgatgccgtgctgggctcggcttacgtcgccatccgcagcttggaggagacgttggagcacggtttccacatcgtcgcctacatagccggcttcggtcagggtggtggcgtcggtgatgacgaacggcacgttcattacgcgggccaacgcctgcgcaagataggttttgcccacgccggtggggccgagcaacagaatgtttgacttggcgacctcgacgtcagccaaagggtcattgctgcggcgggtagcacgcgtctgggtgggaacggattgcttggcttgtttgctggtctgtccactgtgcccgttattcccgtcaagctgctcagcggactcctgaagctccatattgacgcgtttgtaatggttgtatacggctacggataatgcgcgcttggcgttctcctgaccgatgacgtagcggttgagataatcgaagatctgagcgggcttgggcaggctcagcgaattgacctcggcatctttgacacgctcctcggagatgatgtccacgcacagggcgatgcattcatcgcagatggaggcgttgggaccggccaccagttttcgtacctgatgttcggttttgccgcagaacgtgcaacggggtacgtcctcgttgtagctcaccacacgtcccatgattctcctttgccgactgcgccgcaccgtcgaaccgccacgctgcgcattatcattgccatccttgaaatacaatacccccggtcgttgccgaccgagggtattgcaatgtccggaagttttactggcggtgttccaacacctcgtccacgatgccgtattccttggcttcaggagcggtcaggaaagtgtccacttcgatgtcgcggcgaatcttctcgacgtcctggccggtgtgcttggcgagggtctcctccagccattcgcgcatacgcagcatttccttggcctgaatctcgatctccgtggccttgccgaagccttggtcgatggccggctggtggatgagcacacgggcgttcggcagcatcaggcgcttgcccttggtgccggaggccagcagaatggcggcggcggaggcggcctggccgagacacacggtctgcacgtcgggcttgatgtactgcatggtgtcgtagatggcggtcatggccgtcatcgaaccgccgggtgagttgatgtacatcatcacgtcacggttcggatcttgggattcgaggaccagcagctgggccatcacgtcgtcggcggaggcgtcgtccacctgcacgccgaggaagatgatgcgatcctcgaacaggcgggagtaggcgtcctgggtcttcatgccatacggggtcttctccacgaactgcggcatgatgtaacggttggtcggcgcgggctgggctgcgcgggcggaggccggcatgaaaccggctacgccctgacggccggccaagcggtcggcacgggcggcgaactttgcttcttcacttgccatgagtctcactccccctgctggttgttgccgatggtgtccggcgtggtcacgagcttgtccacgaagccatagtcgagggcttcctgggcggtgaaccagtggtcgtattcgttgtcgcggtagatttcctcgagggtgtggccggtctgctcagcggtcagctcgctcatggtcttcttcatgtccatgatgagctcggcgttgatgcgcacgtcagtggcggtgccgccgatgccgccggaaggctggtgcatgagcacacgggcgtgcgaggtcaggtaacgcttgcccttggtgccggagctcagcaggaactggcccatggaagcacacatgcccaggcccacggtcgccacgtcaggctcgatgagctgcatggtgtcgtagatggccatgccggcggtgatggagccgcccggcgagttgatgtacagccagatgtccttcttcgggtcttcggcggccagcatcagcagctgagcgcagatgcggttggccatatcgtccttgacctcttcacccatccagatgatgcggtctttgagcagacggttgaaaatcgggtcgacggggccggccgggacgtcatcgcccgccatgaccggcaaggtcgcaaaggtattgctcaccttgattctccttctaattactcgaacattgttcagactaccgccttgaagcgactgaaggcggcttttcgcgtgctttttggcgggcagcgtagggatttcggttattccaaggtatcgaggacgtcgtcaatgaggaggcgggtctgggaggcggcatcgtcgcccagacgcgggaagcgacgggcggcattggcggggctggcaccggcggctcgcgctacgttggacttgctggccccatgggccacggctttttccgcgagccgatcgaccagtgaatcggcgacttggcgcatctgttcggccacccataattgggccatatccgcaggtaagtcgtagtcttcggccacatcgctggctgcctcctgaatggcggcccataacaccatgaatggctttcgatagtagtcaatctgctcagtgagcggctcagcggcaagcgattcaagtgccgagcgaatttctgtattttctgacatagctttctttacctcggctcccctctctgaggggagctgtcgccataggcggctgaggggagtttcgaccggggcagctcccctcagagaggggagccagaatatatgtatttacttacttacgactcagcaaccactttgatatcagtgacgacgtggccacggccatgccgaccggcacaaagaaggtaatcggcgcttcagagagctccatcaccaagcacatggccataagcggtgcctgctgtgaggccgaaagcaacgaagccgcaccgatcaaggcacacgcggttaccgaatcggtcggaaacatcagtatccatacgaggccgagcatcgcacccagcgtggaacctaatgcgatgccgggctgcagcacaccgcccgacgcaccggagcgaatggtcatcagcgtcaccagcgctttggcaacaaaggtgagtgccaacacacccagcaacatccagatattggactgggacagcgggaaaccggcgttcatcacggatccagaagggccgctcccaccctgaagcatggcccagaacgatgccattccagagcccgctcccccgccagaggccgaaccggatacattaccgccgcccgtcagcaagttccatggagaggcggccgctgaagatgccgactgcatggcaccagcagtgccggcggtttcaggaatgaatgtactgaatccaagttgcgctgcggcacggccgttgcccatcacctgcggcacaacaatcgccaccaaaccggtgatgagaccagccagcggcatctgccacagaatagccttaccggttggcttgtgcgcttccgcccattgcgaaccttttcggaacaatgcgccgcccactccacatgccgcaccgcagatcagagcgaacaccattaacgttggcgtggattccggttgcatggcggtaatgtcgtagaacaggtgatgccctttgatcgcaaccgccacgaatgcggcaatggcagacatgcccagtccaaacgcaactttttcgattgtcacatctaccaacaggatttcgacggcgaagaacatgccggccagtggcgcgtcatagacgcctcctagaccagcaccggcagccactgccaccaccatgcgccggtcgatgccgtcaacgccctcgatatggaacaggtcgcagaaacgttgcgcgagcatggcgccgagttcgcgtggggcgacttctcggccgatcgaggcaccggagccgacgatgaaaatctgcaataccacatgcgcaatggtttgccagaaaggcattcgctttcctgccacggccttcttgactgagggcaccgcagtcgttttgtgtcgcagcagataccagataatgcctgcgatgctgagtcccacggtcaccgatatcgcacggcgtgcagcgggcacgccgaatggaccagacaattctgggccttcgatgtagccgagcagcacatgttcaacgccgtagagcaacagggtcagcagacctgctcccacaccgatgagcacgccgagcacaatggtcgccgcagcgagccaaccaaggcgtttgatagtaaccgttggctgcatgtcaacctccgcaccctatgcaacgagtatgccttgggaactcccctcagtctcgccacgctcgacagctcccctcaaagaggggagccaaagaaatagtccttttgccagaataggaagagcccggaaccatgaaacacgattccgggctcaaacaatcacgctaacgcgatgaggctatgctcactcagcatccttggcgtcatccttggcggacagttcgtcggccacggcggcagcagcggaagcggcctcgacggactcggactcttcgtcctcagcggcctcgcccaggaaggcggagaggtccacaacctcgccatcagcggtgaacttgacggcgcgcatgccggcgagcaggcccttggaacggccgacttcctgcacagcggagccaagctggccattcttgatgatggcctggatgaagttgttcggatccatgccgtactgctgggcgatggaagcgaggaagttgaacacgtcggactgggacacctgaacgtccagcttctcggccagagcgtcgagcaccatctgatcgcgcagatccttctccacggtctcctcggcctgagccttctgctccttggtggccttctccgggtccggggtcatgcccttgagctgctcttcgaccatgttggccttgacgcccttcggcaccgggatctcgaggccttcctgcagcttggcgatgaaggcatcgcgagcctcggtggcctgacgaccttcggcgtcctgagcggcagccttgcggatgtcagccttgagctcgtccagagtgtcgaactcggaagcttcggaagcgaactcatcgttcagctccggcagttcctcagccttgacggagttgaccttgaccttcacggtggccttctggccctcgtgctcgccggcttccagcgtgccttcgaaggtggtctcctcgccggcggacaggccgtcaagggcctcgtccagaccgtcgagcatggtgttggagccgagctcgtagctcacgccttcctgggagtcgacggtctcgccgtcaatctcagcagtcaggtcgatgttggcgaagtcgcccttggcggccgggcggtccacgccgaccaaggtgccgaagcgctgacgcagggcctcgaggcgcttgtcgacgtcctcatccttgacttccggcttggagatggcgatctcaagaccgtcgatttccggcagttcgatgtcaggacgacgctcgacggtggcggtgaacttcagcttggtctcgtcgttggcggactgcggaacatcctgcacgtcgaactccggctgagccatcggacgaatcttcttctcttccagggccttggagtacagctccgggaccgcgtcgttcacggcctcaccggcgacggcggcgaaaccgatgcgctggtcgatgatcttgccgggaacgtggcccttacggaagccgggaacgttcacctgcttggcgatttccttacgggccgcatccagatacgggttgagctcttccggttcaacagtgacggtgagcttcaccttggtgggctcgaggttacgaacgctgatcttcacgctaatgactcctcaaaagtcgttatttcttacagttctgccgtaaggcaacctctacatgataacgccacttacggacggtgcaatgagtttcacttgccagttccttgcgccctgctcgatcaggaacgtctcgacgtccacttccaccgggtctcccacccagcacaggttgcgtaggatctgtggcttgatgatcatctcggccggcgtgcgggtgtcttcggcgatgcggttgatcacacgccgcacccgttgcagacggtcataacgctccggatggcgctgttgccacagccgcatggatcggggcgcgttcaccacaccgttttcatcctgttcgggggcgggcatggtaggccattgggtgggcttcagggccatggctcgatcgatggcctgcttccagaccttcggtttgaccgcacgctgaatcggcgcgtaccgctcgaacattttgtcctgctcggtgccggtatggatgcgcacacgctcgttcagggatcggagcgcgcggaattgggcagcattgtgcggcttgttggtcgccgcctcgatgattgatgaatcggccaataacaggctgggcgcaatatcgtattgccgggcgagtcggtcgcgctcctcccatagggatttggcgatggccaagccccttggatcacgactcagctgggtgatgcgcgagatacgcagccaaggaatcggatgcggtttgcgcggggcaaggcccgcaaccaaagcgtgagaaaactcttcagcggcccactcgtccttgcctgcggctttcaggtcacgacgcatcatggtttcaagttcgataagcacctccacgtcgagcgccgcatagttgcgccagtcgcgcggcagcggacggtaggaccaatcggcggcggaatgctctttggctagcgtgatgccgaggtagtgttcggtgacggcggccagaccgaagcggtgcaggccgagcaatcgcgccgctatttccgtgtcgaacagggctttgggtttgagcccgatttcggcgaatccgggcaagtccatcagagaatcatgcagaatccacgtggcgtcgcccacggcgtcattgaattcattccaatcagctccggcccgggtcagggcgacgggatcaagcaaggcgatgcctgcaccctcacgtttgaactgaatcagccaatcctcgtgcccatagcggaagccggacgcccgttcggcgtcggcggccagcgagcccgtcgcctcggccagcgcatcgcagacacgatgatagccgtccagcgtcgaagtgacatcgggtactcccccgcgaggctctttcagcagtcggggttcggtgtcacggacgtcactcaactggcgtcatcctcctcaaaacggatggtggatctgatgaatgcggcccacgagcggacttgtgcgccggcgtccatagtaccgtccggcccggtcccgtcaagcggggtccatgagacgcgaatctcacacccggcgctggtggagccggccatcgagccaaaagccgtgttctgggtcacggtgactgtgccggataccgaatccggctcgatgccgtcgaaatagtcgcacatgtcatcccagtacatgccgggggtcagagaatcgttttcggcggtttccagcggcagtcgcgcgaacgccacgcaacgccagttggaatcccagtcaatgcgcagctcatgagcataaagcatcatgatccagcctgtggcgattcgtggttcggcatcgctgccaagaccggcggaaaaggcatcgccgagggcacgctctcccgcttcgaattccacgccgataccataatcggccaaggtggaaggcacgggaatctcccgatagcgcacgtcatggatgcgcttcatggtgctgacggattcgacggctgcccatacttcatccggcacaccctgagggcgcacggggcgtccgtcgttggactctcccgtaggaaatgcgtagatgtcggccatatctctagggtatgggcgaacgggccgaatcgtggtatttacgcgcggttcggccctgcaatttaatacacggtgaagccgtggtccttgaactggttggccacccgttcgcgggtggcggcgttgggtcccttctggttctccagcgggtatgggatgcgcagttcgtgccacttcgggcggccaagctggtggaatcccagcacgtcgatgtgttcgacggcatcgccgaaggactcgcagatcttcgccacgttttcgacgttctcttcggagtcggtcaggcccggcacgagcacaaatcgcacccagatcttcttgccggccttggccagtcgctggccaaaatcgatggtgggctgcaaggtgccgccggtgaccttgtgataggtctcctcgtcgccggatttgacgtcgagcagacacaggtcgatgtcctcgagcatctcgtcggtgtaattcgtgttgaggaagccggacgtgtcgaggcaggtgtgcacgcccatctccttggcggcatggaacacacgcgagacgaaggcgggctgcatcatggattcgccgccggagaaggtgataccgccatgcgtggccttgaacaggtccttgtaacgatcgaccttcttgatcatggcgtcaaggtagacgggcttgccgtcgcgcatcttccaagtgtccgggttctggcagtactggcagcgcagcgggcagccggacatgaacacggtcatacgggtgcccggtccgtccacggaggtgttgatgtcccaagagtggacgaagccgatatcgccggatttcagggcggaaaggcggtcacgtcggtcgagtccgattggggattcaaagccggaaaggccgcccatcaaagtctgcgaggcataggtcttcgattccttgagcatatgcctggtcgtggtgcggaacgtgggtgttgcgggcatcgttgtcctcctgttccaaatgatgcgaaagtctgtgggaaataaggaaggggtggagccgtgccccaccccttcagttagtcattgccgcggttcgcggggttggtcatcagtcgacgacggcaccctggtggaaggtacgggagatgacgtcgagctgctgctccttggtgagcttgacgaagttcaccgcgtagccggagacacgcacggtcaggtgcgggtacttttcggggtgctcgacggcgtcctccatggtctccttgcgcagaacgttgatgttcgcgtggtagaggccgtggccgttgccggcgtccaggatgccgaccaggttgccgatgcgctcgtcctcgtcgcggcccaggccatcaggggtgatggtgttggtcagcgagatgccgtcaagagcgtcgttgtagtcgatcttgccgacggagaacatggacggcagcatgccgtgggagtccatgccgttctccgggttggcgcccggagcgtacggggtgcccttggcgtggccggacgggaaggaaccggtgttcttgccgtactcgacgttggaggtgatcgtcaggatggactgggtcgggacggcgccgcggtagaccgggagcctcttgacctggcccatgaccgtggagacgacccacttggcgatgtcgtcggcgcggtcgtcgtcgttgccgtagaccgggaactcgccctcggtgcggtagccgacgatcaggtcgtcgtcggcgccctcaacgtactcgtactcgtggccttccagggtcttcgcgtccttgttgtagatcgggtagaccttggcgtacttgacggcggcgagggagtcggcggcgatggacagaccggacatgccgcagccgagggtgcggtacacttccttgtcgtgcagggccatctcgatggactcgtacgcgtacttatcgtgcatgtagtggatgatgttcagggccatgacgtaggtctcggacagccactcgagagccttctcgtagttgttcttgaccttctcgtagtccagggtgccgtcggcctccggggtaatcggctcgatcacgcccttgtcgatgacctgcatgccggtcatctcgtcgcggccgccgttgatggcgtacagcagggccttggcggagttcacgcgggcggcgaagaactgcatctgcttgccgacacgcatcggggacacgcagcatgcgatagccgcgtcgtcgccccagtggctacgaatctccttgtcggactcgtactggatggccgaggtgtcgatggagatcttggcgcagaagcgcttgtaggcctcaggcagcttcggatcccagaagatggtgatgttcggctcggggccaggtccgaggtgctcgagggtcagggtgttgagcagacggaacgaggtcttggtgaccatcgaacggccgtcatcgccgaagccggcgtcggaccaggtcgcccagtacgggtcgccggagaagatcgaatcgtagtccttggtacgcaggaagcgcacgatgcgcagcttcatgacgatgttgtcgatgagctcctgggcgtcggtctcggtgatcttgccggcctggaggtcgcgctcgatgtagcagtcgaggaaggcggagttgcggccgaaggacatggcggcgccgtcctgggacttgatggaggccaggtagcccatgtaggtccactgcacggcttcctgcgcggtctgggccgggcgggacaggtcgaggccgtactcgttgccgaggttgatgagcttcttcagggccttgatctgctcgtcgtgctcctcacggaagcggatccagtgctcgatctccggctcggtgaagtcgttgcggtacggcacggagtccttgtcgcgcttcttgaaggcgatgagcttgttcacgccgtacagggcgacgcggcggtagtcgccgatgatgcggccacggccgtaggcgtccggcagaccggtgaggatcttgttgtggcgggcgaccttgatctgcttggtgtacacgccgaagacgccgtcgttgtgggtcttgcggtacttggtgaagatcttcttgatctccggatccggttccttgccggcttccttgatggcctgctcgaccatgcgccagccaccgttcggcatcatcgcgcgcttgcagggaacgtcggtctggaggccaacgaccacgttatcgacttccggggagtcgatgtagccggccgggaaggcgtcgacgtcggccggggtatgggtgtccacgtcgtagacgcgctgcttgcgctccacggccaggtagttgtcgtcgaggtacttccacaggtgcttggtcttctcggtggcaggagccaggaatgtctcgtcgccctcgtacggggtgtagttcttctggatgaagtcgcggacgtcaatatccttctgccagttgccctcggtgaagccggcccacgccttggcgtcgagctcctcctgggagacagctgcattttccactgcggtcatgtcactccttaaatggggttgtaggtttcgcatcttcacggaacccttggttcaacagtgtagttggcacttgcttgagaaaagctgaaattgggagtgagctatctcacattgtttttgtgaacgctaccattccaatggcttctaggtattgatgggactattgcacgtctccagatatgggaaaccgctcatactgtgatgttcgtatgagcggttcggtcttgagattgacagcagaaccgtatccgtcagttttcgaccgtcaatcctcggggcgagcctgtgcgggtttcacgccgtagttcttccagcgccggtcctcctcctcccatctggcattgcggtccaccacgatgtcccacgcatgttcggcgtcttccttggtcttgtacggacccatgcgctgttcgatcggtgagaccatgcccaactcggcctgcttcttgacggtgttgaaataccactgcttcttgttatcgtctgtcattggtacctcctcaacggtattacttgctcccgctggcgggagcaatatatgtttattccctgaatgcgttggtgacgggcagtcggcggtcgcggccgaacgcgagggccgtgaccttcggtcccagcgggtattggcggcgcttccattcggcgcggtccaccaatcgcatcacggtgtctacggtgacctggtcgaagccgtcggctaacaggtcggcgcggccgtgcgcgtgctcgatgtatgcggcgagcaccttgtcgagcagcgcgtattcgggcagggagtcggagtccttctgcccggggcgcaactcggccgagggtgccttctcgatggaggagaccggaatcatcacgccgtccttcaacgggatgccggtgttgccgtcctcgttgcccacgatcttgagaccgccgatgccgacgcctgcggccgcggccttgttacgccaacggctgatctcccagacacgggtcttgagcaggtccttgatgggtgcgtagccgcctaccgcatcgccgtagatggtcgagtagccgcaggcgagctctgacttgttgccggtggccacggcgagcagaccgcgcgaattggagctggccatcacgatcacaccgcggatgcgggcctgcaggttctcggcggagacgccatcaaggtcaagttgctgttggtaggcgttgaacaatggctcaatgggctggacctcgtaatgggcgccaatgttggaggccaaatcggcggcgtcgtctttggaaccgtcggaggagtacatggagggcatggagatgccccagacgttctcgccgccgcatgcgtcggccgccatggcggctaccagtgcggagtcgatgcctcctgagaggcccagcgtcacgccggtgaagtggttcttggccatgtagtccttgaggccgagcacgcaggcggtgtatacctcttcgtccgggtcgagttccggaacgatctcggccttggcctgatgttcggcggcggaatcgaagtcccagaacgtcaggttttccatgaacatcgggctgcgttcgataagcgtgccgtcggcgtcgaccacgaagctgccgccgtcgaagacgaggtcgtcttgaccgccgacctgattcaggtagatgaccggggcgttaacctcggcggcacgacgctgggcgagctcgaaacgggtgttggtcttgccttcctcatacggcgagccgttgatggtgagcagcaggtcgatgttcttggtggccaggtcggccaccgggccgccgtcctgccagatgtcctcgcagatggccacgccaatggtggcgccgtccacgtcgagggtcacggagcggtcgccggcggagaagatgcggaattcgtcgaacacgccgtagttgggcaggaagtgcttgtcgtagccagcccagaccacgccttggtgcaagaccaccagtcggttgcgcggcttggaggtcttgcggtcggtgcccacggtgccgaccaccacgaacagatcgccgaggccgtcgtcgttgagctgggtggcgagttcgttggccttgtcccatgcggcttggcggaaggtgcggcgcagggccagatcctcgatggggtatccggtgagggtcatttccgggaaaacaaccacttgggcgtttcctgcggcggctttacgggagtagtcgagcaccttggcggcgttggcgtcaagcgcgccgacgcaggtgtcgatctgggcgagtgcgaagcgaagctgtgtcatagattcttagtgtagccgcgtatgacgtcggattgcctgttcttccggcttggcgtcattcattaggtcgtttttgcgttcattaggtcactgcaatgcgatatcagtcgttgcaatggcgcgattccaacaaccagtatcgccgttcaccgacctaatggacgatgaatcgacctaatgaacgaatgccactcccctcagtcagcttcgctgatagctcgtcctgcacttatggacgggcgaggcccgcgcatatctggttcggctgtcgcctcaccttcggctacagacagcccactgggctgtctgcctaacgcctcagcctccggaggtgagccagaaaaggatttacttcagctcgttgagcacgcgcagagcggtgttgacgtagaagttgacgaaggtgggaatggattcgtcgagacccacgaaatgcgggctatgccagtcggcgcaaccttcctggccgtttgacccgacgaacgcgaacaccggcaacgtcaccttggcgaattcgcagaagtcctcccccgccatcgactgacgtatcggttcgagctgcgcgtagtcgttgacatccgccgccacggccttggcgagacctggatcggagaccagcgggtcttgaaagtcatcccagaccacgtcggcgctgatgccgtatgcctcggcggtgtgttccaccacttccttgaatcggcggccgaccagattgccatccgacttgtggaaatagcgcacagtcccttggaatccggcttcggcgggcaccacgttccacacatggccgccgtgcacttcggtaacggacagcaccagcgggtggaagggcgtgacgttgcggctcacgatggtctgcaggctcagaataatactggcgagcgcttcgatgggcccggtgcccttgtacgggtaaccggcgtgggtgccttgggcgtggagggtcacgcggaatttcacgcagccggccatcatcggctcaacgccgatggccagctggccgggcgcatagttggggttgttgtgcgtgccgataatggcttcgacgtcatccacgagtccggcgtcgatcatggcgcgagcgccttggccggtctcctcactcggctggaacagaatcttgatcgagccggcgaacttgtcacggtgctcggcgagccagaaggcggcaccgagcagaccggtcatgtgcaggtcgtggccgcagccgtgcatcacgccttcattgacggagctgaactccagtccggagtcttccacgatgggcaggccgtcgatgtcagcgcgcagcccgatacgcggcccgggaccggcctcgccctgaatgagccccacaacaccagtctccagcgggttgtgcaggatctcgatgccgtgcgccttgagctggtcggtcagatagatgctggtgccgaattcacggaaactacgctccggatgggcgtgcaggtagtggcggatagtgatgagttcgtggtcgatgtcgatatgttcactcatggttcccgattctagtagcgcgaagaatatattgcggccctcgctccatattggcgagggccgcgatctatggggtcagtatgccttgttattgctggcgtttgagcagtcgtttggcgatggcgttggcgatgccctgcaccacctggaccagtacgatcatgatgatcacggccgtccaggtgacggtctggtcgaacttctggtagccgtaggcgatggcgaagttaccgagaccgccaccgccgatgtagccggccatggcagacatgtcgagcacgccaatgaacaggaaggcgtaggccaggatcagcggtgccagggcttcggggatgagcacggtgcggatgatggtgagcttgccggcacccatcgaacgcgaggcctcgattactcccgggtcgaccggcacgagattctgttcgaccagacgcgaggtggcgaaggtgcacatcaccaccatcgggaagatggcggccacggtgccgatggacgtgccgaccacgacgatggtgagcggctgcatggctgccaggaagatgatgaacggaatcgggcgcacgatgttgacgatgatgtcaaggatgcggtagacgaccgcgttctcgaacaggttgccggggcgggtgccatagagcaccacgccgaggatcaggccgaggaatccgccgatgacgagggtgacgagcaccatggtcagggtctggccaatggattcgaacagtagtggacgcagcacgttccagtcgctacgcgggttggcgaggatgatcatgcgttggctccttcatgtgcggcggcggacgcggcgggcgcggtggcagtatcggccgccagtgggtcatgggcgcggtcttcggcgtaggaggcatgtccggcgactgcgtcggcgtaggccacaggctttgcggcggtgccgaagtcgatgacgtcgctattggcggcgagctcgcgcaggaattcgtccacatgccagccgggcccgttgaattcgtaggtgatggcaccgatggcggtccccttgaccgtgtcgatgccgccgtagagcaggctggattcgacgccgtatttggcgatgagttcggagatattctgtccggatgccttgagttcatggccttgggtgccggaaacgtccttttggcggataagcacggtgacaatgcggcccgaccattcgtgatgcaatcgctcgacccggtcttcctcgggcaggccagacaatgcggtggcaatgaatcgcttggtcaccggctgctggggtgcagcgaacacatcgtatacatcgccggattcgaccacgcgtccggcgctcattacggccacgcggccggcaatctgctggaccacgttcatctgatgggtgataagcacaatggtgatgccgaattcctcgttcacacgcttgagcaaggccagcacttcagtggtggtttccgggtcgagcgcgctggtggcttcgtcggcgagcagaatctccggattagtggccagtgcgcgggcgatgccgacgcgctgcttctggccgccggacagctgcgaagggtatttgtttgcgtgctcactgaggcccacgaattcaaggagttcgttgacacgacgatcctgatagtccttgcgccagtgatcgagttgcagtgggtaggcgatgttctgggccacggttttggtggagaacaggttgaactgctggaaaatcatgccgattttctggcggatgggccgcagcttggtctcactcagagaggtgatatcagtaccaagcacggtcacagtgccggaggtgggtcgttcgagcgcgttgataagccggaccagtgtggatttgcctgcaccggaatagccgatgatgccgaagatgtcaccgcgatcgatggtcaggctgacgtcatccacggctcgtgcgatgttcgcgccgcgtccgcgtgttttgaattccttcacgacatggtcgaaggtgatgatggggtcgctcatagtgctccctgatgctggttgttggtgtccggtcacggaagcggagcgaatcccgattgttggctcgggtactcgctccgcttggtggtaatggctatggacaggctagtcgtgcgctcgtatcagccgcggctcactgctgggccttggcatccttctcaatgtcggacaggaagccttgcagctcgctggcgctgaacttgtcggcgaacaccgcggtaccgccggagttctcctgcagggcgtcgagcacatccttctgctggtagatggaaacgagcttcttgtaggtctcgttgttcacgtccgccttgcgggccacccacacgttgatgtaggggcgagcctcttcggattcggcgtcatcctggtagatggcgtccttcgggtcgagaccggcatcggccacgtagtcgttgttgatcacaccagcggcgatggtcgggtccttcagggtggtggccacctgttcggccttgagcggggtgaccttgaccttgctcttggcttcgtcgatgtaggccggggtggagaaggcggtccagtcgcccttgagcgtcacgagaccggcggccttgagcacgccgatagcgcgggcctggttggtttcgtcgttcggaatggtgacggtgtcgccctgcttcaggtccttgatgtccttgaccttggtggagtacacgccgagcgggtagatggcggtgccgccgatgggctgcaggtccttcttgttgctcacgttgtagttggccaagtagagcaggtgctggaattcgttgaggtccagctcgccggagtcaagggccgggttttcggaggtgtagtcctggaagtcgacgatgtcgacgtagatgccggccttctcggcgtcctgcttgaacttgacccattcggggttggtagcgccgaccacgccgatcttgatcgggttgcccttgctgcccttggcggacgactcgttggcaccggcaaacgcacggtagccgaagaacgcggccacggcgataatcgccacgaccacgatggtgatgatgacgttgcgggcggtgtggttcacacgcaccggctcgttattgttaggagcggccggggttgccggctgggttgctgctgtcattggatttcctctctccaaaattgatgtcgggtaacaccataacgcgcttgaaccgcgaaagtgacggaaaatggccgattgccgtataggtgtcttttatggcgcgcatgcaatgtccgggattcgtgcgtttgataacccgctataggcgtgctgaacacgccggaaagcacgtcgagaggggctttgacaatggaagctatgactaccgatactgccaatgccgatatccgagccgtattcttcgatatcgatggcacgctcaccagtttcacgacccatacggtgccggattccacaatcgaggcgattcaccagctgcaggccgtaggcgtcaaggtgctgatttgcacgggccgcgcgccttcacagatgcacgtggtgctggataccatgccggtgacgttcgatggcgtggtggcgttcaatgggcagtattgttttgatgacaccgacttctttgcctcgcaggccttggatactgctgatattgaggtgattctcgactggctggaccgtcaccccgatgtggtgtgcaatttcggcgagaaggattacgtgtacttcaaccagtccaatgatctgcttcgcgccacgtggagcaaactgggcaaaaccgcaccgacccggtattttgaggacccactcacccgcgcgctggatcatgagactttccagatcagtccctttgtcgggcccgagttggaggccgaactggtgggactgtgcagcaatgtgcgcggggtgcgttggcatccggatttcacggatctgattccggccgatggcggcaagccgcgcggcatccagcggttcatggcgcattacggcatcacgcgcgagcagaccatggccttcggcgatggcggcaatgacacggatatgctcgcctacgccggcatcggagtcgcgatgggcaacgcgaccgccgagccaaaggccgccgccgattacatcaccgatgacgtggaccacgacggcgtactcaacgccctactgcatttcggggtgctacgcgattaaaacatcacaacagttcgctttgttctgccccgccgtgacagggcttatgaataagcaaagggctcgggacgaatcccgagccctttggtgttagcgaactaacaacaccgtggaggtgttatcactcgttgtcgccagcggtagcggcggtagcggtgacggcacccttcttgtcggtgttcacgccggagtacacccagtcggtgtagtccgggtgatcgtagccgttgtcgacggcgaactggaaggcctcatcacggaacttctcgagctcgtcgatcttgtcggcgtacttgtcggcgtcgatcatgcgcagagcctcagcggtcagctcgtagcggtcgatgcggttgacacgaaccatgtcgtacggggtggtggtggagccctcctcctcgtagccgtggacgttgaagttgtcgtggttcggacggtcgtagatcaggccacgcacgtcgtgagcgtaggagtggtacgcgaacagcaccggcttgtcggcggtgaagatgtcggcgaactcctcgtcggtcagagcctcgtcgttctccttggcggactgcagggagagcaggtcggcaacgttcacaaccttgaacttgatgcccagttccttcagcttgtcggaagcagccatgatctcctgagtcgggacatcgccggcggcggcaagcacgacctcggcctcatcgttgttcttggcggtggaagcccaatcccaagcggcggcacccttctcgagctcggcacgagcctcgtccagggtcagccaggtggcagcaggctgcttaccagcgatgatggcgttgatcttgttggtggacttgtagcacttctcggcgatggccagcagcatgttcgcatcggtggcgaagtagatgccgatgacgtggtcgttgtggaagcacttgttcagcaggacggaggtgacacccggatcctggtgggagaagccgttgtggtcctgacgccaaacgtgggaggagaccagcaggttcatggaggcaatcggcttgcgccacggaatctcgcggacggtagcctcaagccacttggcgtgctggttcagcatggagtcgatcacgtggacgaaggactcgtaggagctccagatgccgtgacgaccggtcagcaggtaagcctcgaggaagccttccatctggtgctcggacagctgctcaacgacctggccggagacgtgcatgtgctcgtcgacctcgtcggagatgtagccggcatcccactgcttgttggtgacttcgtaggaagcctgcagacggttggaagcggtctcatccggtccgaagatgcggaagtcgcgcgggttgttcttgatgatgtcgcgagtgtaggcacccagggtacgggtggcctcgagctggccccagccgtggccgtactcagccacttccttgacctcgtagtcctcgaggttcggcagcttcaggtcgttgcggatcacaccaccgttggcgttcgggttggcaccgatacgcagctcgcccttcggcatgaaggcaaggacgtcgtccttgacagcaccgttggcgtcgaacagctcttccggcttgtaggactcgagccagttcttgagaacctcgaagtgggcctcggtgtcgcgggcggaagccagcggcacctggtgggaacgccaggagccctcggtcttcttgccgtcgatgtacttcgggcaggtccagcccttcggggtgcggaagatcagcatcgggtagaacggacggtgcacgttgtcggtctgagcggtggccttgatgtcgcagatctcgtcccagatggtctcccacagctcggcgaagcgacggtggatggacatgtggtcctcatcatcgaagccagcgacgaactcgtagggctcgtaacccatgccgtggaagaactcgtggagctcttcgtcggagatgcgggacaggatggtcgggttggcgatcttgtagccgttgaggtgcaggatcggcagcacgataccgtcggtgcgcgggttcacgagcttgttggactgccagccggtagccagcgggccggtctcagcctcgccgtcgccgacgatggccgggacaaacaggctcgggttgtccatgatggcgccgtaagcgtgggacagagcgtaacccagctcaccaccctcgtggatggagcccggggtctccggagcgaagtgggacggaatgccgcccgggtaagagaactgacggaagaacttctgcagaccagcttcgtccttggtgatcttcgggaaggtctcggtgtaggtgccgtccaggtaggactgggaggtaccggccgggccaccgtggcccgggcccatgatgatcacggtgttctggccgtggtcagcaatgaaacggttgatgtggccgatgaggaagttcaggccaggggtagtgccccagtggcccaccagacggtgcttcacatcttcgcgggtgaagggctccttcatcagcgggttggaacgcagataaatctggccgatggaaaggtagttggcaacgcgccagtacttgtcaacgccttcgagggcttcctcggaaaccggagcgttgagcttcttccaaggggtgccaataacaggactcgtcatgtgtactcctgtactcctgcacgtgatcgtgcgattgattatttctgttcggtcacggtccctgacccttgcggtgccaaggttttccgttcccaatcaatcgtcatggtacgaggacaacgcgacttttgaacgatttcttgcgggtgtgttcgaaattgttgcggatatttcagtatttgtgcggttcgactgaccgtttgtcaacattagttttttcaacatactttttcaaaacggcggaagcatgcggaaatccagcatttggctagaacagcgcacgttcgatttcccatgttcgaaatcggcgtgttgtccgtctacaggcatgtagtttgttcgatttgcgcacatagtctctgcgtgtcggccttgtcgccttgaccagtgataatcaggggtgttcagcccacgtaaaattccaatgaacgttaggggaatatcaatggcaaacggtcctgtgcttgtcgtcgacttcggcgcccagtacgcccagctcatcgcccgccgcgtgcgcgaagcaggcgtgtactccgagctggtccctcattccatgccggtcgacgagatcctggccaaggatccgaaggcgattattctgtctggcggcccggcctccgtgttcgagcccggcgcgccgaccatagacaccaaggtattcgaatccggtgttccggtgcttggtatctgctacggcttccaggtcatggcctatgagctcggcggcaaggtggataaggccgcgctcggcgaatacggcaagacctcagccaccatcgacgacgccgccggcatcctcgccgactcccccgccgagcagaccacgtggatgagccacggtgtggcggtcgaacaggccccggccggcttcgaagtgctggcccacaccgaaggcgcgcccgtggccgccatggcggacgaatcccgcaagctctatggtgtgcagtggcacccggaagtcaagcactccccgcttggccagaagcttatcgaaaacttcctgcaccgttgcgccgcgctgcccaacgactgggatgcctcctcgattatcgaggatcaagtcaagaagatccgcgagcaggtcggcgacgccgaggtgatctgcggcctgtccggcggcgttgattccgccgtggccgccgctctggtacacaaggccatcggcgaccagctcacctgcgtgttcgtggaccacggcctgctgcgcaagggcgaagtcgagcaggtcaagcacgacttcgtcgccgcgaccggcatccgcctcatcaccgtcgacgccgccgacgacttcctcgacgccctcgcaggcgtctccgagccggagcgcaagcgcaagatcatcggcgagaagttcatccgcacgttcgagaaggcccagcgccaagtgcttgaagaggccggcgcgcgcggcaaggaagtcaagttcctcgtgcagggcaccctctaccccgacgtcgtcgaatccggcggcggcgacggcgcggccaacatcaagtcccaccacaacgtcggtggcctgcctaaggacatcaagttccagctcatcgaaccgctgcgcaccctgttcaaggacgaggtgcgcgccatcggaaccgaactcggactgccggatgagatcgtctggcgccagcccttccccggcccgggtctgggcatccgtatcatcggcgagatcaccaaggagcgtctcgacctgttgcgcgaggccgacgccatcgcccgcgaggagctctccaaggccggcctcgaccgtgacatctggcagtgcccggtcgtgctgctcgccgacgttcactcggttggcgtccaaggcgacgagcgcacctacggctcccccatcgtgctgcgtccggtgagctcggaggacgccatgaccgccgactggtctcgcgtgccctacgacgtgctcgccacgatctccacgcgcatcaccaacgaatgccgacagatcaaccgcgtcgttctcgattgcacgagcaagcctccggccacaattgaatgggagtaattgctctctgtgacgaatgggattctccatcggggaatcccttttttgttgccgacgatgcccggtataatttttccgcttacgacgtcgtccggaaagggatgccgacctctttgcgccagggattcgacaacgaaaaatacatcgaactgcaagccgccaacatctcaacagcgtgaaccgacgcttgcactcggatgaaacgctgagtgcattgtcaatcaccagcgccaccagtcctgtggccgctcgcgtcatcgacgggctcaaacagttgcagggctgcgacgcctttttctccgttataatctcatccacggacgaggcgctgtatcgcaaactcggcatcaacgtgtgctgcgaaccgaagtacgaacgggtgagtctgtatcaccggtaagcgccaccgataagcgcggtatgccgcgaatcgtcaagccggtaatcatgcagcatgcggcctgacgattcgctgctgtcgcattgtctctcccctcggccatgctgggcttgttttccgtttgttggagagaacggggaatgccatcagcactacggaaagagaaggattatccgtgaagcggttcgtgggtttagacggtattaaaggactagcgctgatagccattgtgctgtaccactgcatgcagcaacggctgccaggcggattctacggagtcgacgtgttcttcaccgtctctggattcctgattgccgtcagtttgattcgttctctggcgaaaaccggatcgctgaatctcgtgcgatatattcccaagcgtgcagtacgtctctatccggcgctgtttctgctgattccggtcatcgtctccgtcggctggctgttcgatcacgacattctagtttccatccgcgaccaagtcatcaccgtgctgctgggctgctacaactggtacgccattgccggaggccaaagctatttcgaccaaatgaacccgcaggtgtttcgccatctgtggttcattggcgtgctcatgcagttctacgtcatcgtgccgttcatcgtctggctgatgtggaagctccgccagacgaaactgtcttcactcatcccactgggactcgcggcgttcagcagtatcgccatgtgggtgatgtatgtgcccaaaggcgaccccacccgcgtctacttcggcaccgctacccacagcatgggcctgatgctgggtgtggctctcgcctggtgggtcaccgctcctcagttgggccacgctcgccagagggctgtgccgatgccccgcaccattagctcgagcgcttcggcagccgcacatcgggctccgttacctcagattcccgtggagcatcgcatctggaatgcggcggcaccggtattggcgttcctcagcctgattgccttggtcaccatggcggttatcggcaaacaggatgcattcgccttccgcggtggcatcatattgtccagcttgttgtccgtgctgctgattgccggtaccatctccgacgattcctggatgcaaagcctcatggtgttcaagccattggcctccctcggcaagtattcgtacggcatctacctgtggcactggccgttgtggattctttccagcgcccttgccccgaagatcttcaaggcagtagggccttggcctctcatcatgaccgcgttgctcaccgccattgcggtgatgatttcctggctgatggtggagaaaccggcggcaacgcactcggcggtatccgtcgtggtgccccttcgcacgaacaagaagaatcatgtggcccgggttattgccgttgacgttatcctggtgctgtcgttggccggctgcgtgcagggcattgctcatgcacctgcgaaaaccgccatgcagatccagctggagcaacaggccgcacaactggaacgtatgcagaaaaccgaacacgtgctgctgcgccatgccgtgccggcaccgcccaagcccaagcatgagatgcccaccggcgatcagattaccgccataggcgattcggtgatgctggcctcatcacagggcctttcggaagtcttccccggcattcagaccgacgcgagcgtttcccgctccatcatggtcgcccccgaactcatcggcaacgctctgtccgccggcagtctgcggcagtgggtgttgatcggccttggcaccaattcggcaatcacccccgatcagttggaccagattcgtaatatgatcggccccgaccgcgtgctggtactggtcaatgcccacggagaccgtacgtggattccacctaccaaccaggtgcttgccgactatgcggccgcacatccggacaatgtggtgctggtggattgggatgccacagccaacgcgaacgcgcaggtgctcggctccgacggcatccacccgagcatggatagcgatatctatgcaaaggcggtcagacagaccatcgaacaatggatcgcaagcggcaggtgaacggcaggcaacgctgagttgtccaaccggtcgtgaagaacggctatgctgaagactgcatcaacgagaccacacgttgggagacatggtgagcgcaatccttgaaggaaagcccgataagaatcttattctcgttacgggaaggattcatccgaagttggctgaggatgtcgccgagcagctcggcatcgacgtccttgaaaccaccgcatacgatttcgccaacggcgagatgtacgtgcgctacactgaatcggtgcgtggcgccgatgtgttcgtgctgcaaagccactacaagcccatcaacaaggcgatcatggagcagctcatcatgatcgacgcattgaagcgcgcctcggcccgttccattactgcggtctgcccgttgctcggctactcccgtcaggacaagaagcaccgcggccgcgagcccatctcctgccgtctggtgttcgacctgctgaagaccgccggtgccgaccgcatcatgtcggtcgatctgcatgccgcgcagtcccaaggcttcttcgacggcccggtcgatcatctggtggccatgccagtgctggtcgactacatccgtgatcgtttccagggccatctcgacaacgtcgccgtcgtctcccccgacgccggccgcattcgcgtggccgagcagtgggcgcagcgtctcggcggcggtccgctcgctttcgtgcacaagacgcgcgacatcacccgcccgaaccaggcggtcgccaaccgtgtggtcggcgacgttgccggcaaggactgcgtgcttgtcgatgacctgatcgacaccgccggtaccatcgcgggcgcatgccacgtgctgcaggacgcgggagccaagtcggtgaccgtggtcgccacgcatggcgtgctctccggcccggccgtcgagcgactcaagaactgcggtgcgcgcgaggtcgtgctgaccgacaccgtgccgattcccgaggaaaagcgctgggatggcttgaccgtcctgtcgatcgccccgctgctggccagcgccatccgcgccgtattcgaggacggctcggtcgccgaactgttcgacacctaccccgagcaccacggtcaaggcttcctgttcgcctgatcacgtgcgtgtttgttcgtggaaagcacacgatgcgagacgcgacatggcgtagcctttcggtaaataccgacagtatggtataaatgaacacttgtgggccgaaagcccacgactcccccatggtgtaatggcagcacacgggtctttggaaccctttgtcttggttcgagtccaggtgggggaacggctgatggccgctcgacatccgggcggccatctattgttttgaggtgtttccaccctcaatagacattccgatcgaagggaatacgtcagttatggcattatccgcagccatcgtcctcgccgccggcgagggtacccgcatgcgttccaacaagccgaaggtgctgcatgcttttgcaggcaagaccttcctgaacagggtcatggattcggtggccgccctgaatcccgacacgttggccgtggtcgtgcacttccaggccgagcgcgtcgccgaagccgcccgctcctatgacgagcaggtcaccattgtgaaccaggacgacattcccggtaccggccgcgccgtgcagtgcgcaatggcgcagctcaccgaggctggcaaggtcgatggcccggtgctgatcgccgcctccgacatgccgctgctcgacagcgagacgctgcaccgtctggtcgaattccacaccgcctccggcaacggcgccactgtgctcaccaccatcctcgatgacccgaccggctacggccgcatcatccgcgatcgcgaaggcaacgtgctgcgcatcgtcgaacagaaagacgccaaccgcagcgaactcgccgtgcaggaagtgaacacctcagtctacgtgttcgaggcttccgtgcttaccgaggcaatcgccggactgaagtcgaacaacgcgcagggtgagttctatctgaccgacgcgctggaaaccgccaaggccgctggcaaggtcggcgcgttcgccgctccggatccgctcaccgtcgaaggcgtgaacgaccgcgtgcagctggccgcgctgtccaagacctacaaccgccgcgtctgcgagcgctggatgcgcgacggcgtgaccattcttgacccggaaaccacctggatcgaggacgatgtccaaatcggccgcgacgccaccatcctgcccggctccttcctgcaaggccacacggtggtcggcgaggacgccatcgtcggcccgtacaccaccctgatcgacgcaaccgtggacgaaggtgccgtggtcgagcgttcccgcgtacaggaatcgcacatcggcgcacgcacgaacatcggcccgtggacctacctgcgcccgggcaacgagttcggcgaggatgccaaggccggcgcgttcgtcgaaatgaagaaggcgcacatcggcaacggcaccaaggtgccgcacctgagctacgtgggcgacgcccagcttggcgaccacaccaacatcggcggcggcaccattaccgccaactatgacggcgtgcacaagaaccgcaccaccatcggctccggctgccacgtgggtgccggcaacctgttcgtggccccggttgaagtgggcgacaacgtgaccaccggcgccggttccgtggtgcgccacgccgtgccgagcgacacgatggtctactccgagaatacgcaacacaacgtcgagggctggaagcccgcctgggagcgctgaaccatgcccgcacttcaggattccatcaacgccgtccgcgtggccgccgaggccgcggaccgtatcaaagccaccgacatcgtggccttcgacgtagccgacctgctcggcatcaccgacatcatgatgatcgccggcgcctccaacgagcgtcaggtactggccgtggccgaggaaatcgaaaaggacctgttccttaagtgctccggccgtcagccgcgctctcgcgagggcctgaccgagggccagtgggtgctgcttgactacggtgatttcgtgattcatgtcatgcacgaggaatcgcgcgaattctacgggctcgaacgactctggcgcgactgcccggccatcgatcttgaactcgcacacccggaaacggcggagcatgcggaagatgctgccgtcaccaccgcgtaacgtgcgaatcgcgtaacgctgatacttgctgatattcgctgatattcgctgatattcgctgatattcgctgatattcgctgatattcgcgtgtcgggctgcctgttgccgaacgtcattgacggcaccaggcagccctccctttttcctgtttcctcactggaaccgaaaggatcgtcactatgaccaatcatgttcgttccgttttccttatccgtcatggacgtacctcctacaacgccgctcacaagctccaaggccaggtcgacattccgctggacgccgtgggtgaatggcaggtcaagcagaccgccgcggccttgaaaagcctgtacgtcgatcgtcggccggaaatcaaccaccggttcattgtctgctccgatttgaagcgtgcgcacgccaccgcgcaagctttcgccgacgtattgggtggaatcgagcccgtcgatgatcgtcgcgtccgtgaacgcagcttcggtgattgggatggccatgccgtggccgaactggccgaacgctaccccgaggacttccgttcctggatggagtctcggggcggcgagctgaagtatggagccgagcccaaggaagctgtgggcaagcgcggcgtggaggctcttgaggactggtccacgcgtgccggagacgacacggacctgttcgtgttctcgcacggcgcatggattgcgcagacattgcagaccctgttgggcatttctgcaatcgatccgaccttttccacggtggtttcattgcgtaatgcgcactgggtgcgcttggtgccgatggacaatcccgatggcactgtgcgctggcgtctgctggactacaatcacggtccggccatcgccgacaccgacgagtgggaacgcgaacgctgatcgtgtcacggctcccctgctgagccaacaggttcagtgtattcgaaaaaccgttcaagcagtaattgaataacccaatgcctgaataatggcggaaacaagccaaaaagtgtcgccaaatcccacttttgccatttggcgacacgccggcttttgccagaatcgacatctcgtcgtaatgtatacgaggtccaaacaacgggccaacaactgaaaacggggctatagcgcagctggtagcgcatctccatggcatggagagggtcgggggttcgaatccccctagctccacgacgaagccatcaagtcaggcgatatggtggtttctccgctggttcatggcgggtcttgcgactcccatgaatcggatagcttcactcggggctatagcgcagctggtagcgcatctccatggcatggagagggtcgggggttcgaatccccctagctccacaatcgaggccggtgcttcacgcaccggcctttttcgttttctggcctatcggccgacttttggggttttgcgcaacattccccggaaagcgtcgcaaaggggacgcttccgattggcgcgacaccggcgtgagcgataacagtaatcgccactacaatgaggtgtggtccctatcgtgttgatcatcaaaggagacaaaaacatcgtgaccgtcacccgtgtatatatcgccagccctgaaggcgccaatggccgcaacgtcgtcgcttacggcatgctcaacgcattgacttccaagtacaagaccatggtgttccgccctgctgtgtccaaccatgacgaattcaccccgatcctactcgccgcctccaatgccggactcggcgtggccctgtccaccggcctcgatgtgcacaaggtgcgcgaggataagaacaccgcccgtggcgatatcgtcggcgcgttcaacgatgccatggacgtttcccgcgcggacgccgccctgatcgtgggcaccgacaagtcccacgtcaacgatccgaccagctatgaattcgacgcgaatgtcgccgctgatctgaaggccggcgtgttcctagccgtgtgcaccatcaaccgttggccgcacgagctcgacgagaccgtcaagctgtccatcgagggcatggaggccgctggcaacaaggtgctcggcatcttcgtgaccggatgcgagccgcgccacgctttctccgttaaggagaccctcgccaagtacggcctgccggtctggactcttccgcaggtgccgttcaccgatgaatccaccaaggatctggcgctggaggccttccgtaagaacgctcccaccgatgaagtgctcgccgcgctcgatgtggacgtcaccgcgcccatcaccccgtacgccttccagttcggcctgctcggcaaggccaagagcaacaagaagaccatcgtgctgcccgaaggcgaggaggaccgcatcatcaaggcggccgactacctgcttgagcgcgagatcgtgaacctcatcatcgtgggcaacaaggacgccattctggctcgcggcaaggaactgggcctgaactacttggatcgcgcccgcttccaggctatggacgacgagaacgtgctgaagcccatggtcgccaagctgtgcgagttgcgtgccaagaagggcatgaccgaggagcaggcccgcaagcagctgaccgacgccagctacttcggcaccatgctcgtggtgctcggctacgccgacggcctggtctccggctccgtgaactccaccgccaacaccgtgcgcccggccctgcaggtcatcaagaccaagcccggccagaagctggtctccggcgcattcctcatgtgcttcaaggaccatgtggccgtgttctccgactgcgccatcaacctcaacccggacgccgagcagctttccgaaatcgcgctgcagtccgccgagaccgcacgtgccttcggcatcgacccgaaggtcggtatgctctcctactccaccctcggttccggcaagggaccggacgtggacatggtcgaggaagccaccaagctgctcaaggagaaggctccggatctgccggtggtcggttccatccagttcgacgccgcttggtcccccaccgtagccgccaccaaggccaagggcaacgatgtggctggacacgtcaacgtgttcgtcttcccggacctgtgcgccggcaacatcggctacaaagctgtgcagcgctcctccggcgccttggccatcggcccggtgctgcagggtctcaacaagccggtaaacgacctgtcccgtggtgctctggtgcgggacatcatcaacaccatcgccctcaccgccatcgaagcgcagtgagcccggcttggctcccggtggctcccgccagcgggagccaccgtaatgccttttttgtagcaagcaacgagtaatctaatcaacggtaacccgtgtctcacgggaacattcaatcacaatggaggatgcccataatggcgaaaaccgtccttgtcatcaattccggctccagctcgatcaagtaccagctggttgatctcgaatccggcgaaggcctcgcttccggcctcgtcgagaagatcggtgagccggtcgacggccactacaagcacgagtacaacggcgaaaagcacgagcttgaagagccgattcacgaccacgagcagggtctgaagcgcgtgctcggcttcttcgaggagtacggcccgaacctgtctgaggctggcattgtcgccgtcggccaccgtgtggtgcagggtggctctatcttcccgaagccggccctcgtgaccaacaagaccatcaaccaggtcaaggatctggctgtgctcgccccgctgcacaacggaccggaggccaagggcgccgaagtcatgcgctccctgctgccggacgttccgcagatcttcgtcttcgattcctccttcttcttccagctgccgaaggccgccagcacctacgcgctgaacaaggaaatcgccgatcagtaccacatccgccgctacggcgcccacggcacctcccacgagtacatctcctccgtggtgccggacgtcatcggcaagccggctgaaggcctgaagcagatcgttttgcacatcggcaacggcgcttccgcttccgctgaggtctccggcaagccggttgagacctccatgggtctgaccccgcttgagggcctgatgatgggcggccgtaccggtgacatcgacccggctgtggtcttccacctgatccgcaacgcccacatgaacgtggacgagcttgacgccctgttcaacaagcgttccggcatgatgggcatgaccggctatggcgatttgcgtgaggttcaccgtctggtgtccgagggcaatgaggacgccaagctggctctggatgtctacgtgcaccgcatcgtcagctacatcggcaactacacctaccagatgggtggctgcgacgtgatcaccttcaccgctggcgtgggcgagaacgacgacgtggtccgcaagatggtgtgcgacaagctcgctccgttcggcgtcaagctggacgaggagaagaacgccacccgctccaaggaaccgcgcatcatctccactccggactcctccgtgatcatcgccgtgattccgacgaacgaagagctggccatcgcccgcaagtccgccgcaatcgccgaagccggcaccgacacctacggcaacaccttcgccaagtaagtaaccgccgttaggcatctcaccaatctctagttgcaacactatgggggctgattccgattggaatcagcccccattcgtatatggtcatgagacccctacccctgcgtcatactccccctcagtcgcctccggcggactgaggggggtccaccagaacacaggaccccttactgcctcagcatgccgctccacataccgacgaaatcaggcaaggtcttgcgcgtggtggccacgttgatgacctcgatatcgggaatacgcagccccagcatcgcggcgaacgtggccatacggtgatcagcataggtttccatcacggcaccgtgcaacgtctccgccggcaccggttcgatacgcaatccatcaggcaattcctcagccgctcccccaacacgacgaatctcgttgaccaatgcctccagacgattcgtttcgtggccgcgcaagtgaccaataccaaccatgtctgtcgacttatcagcaaacaccagaatcgccgccaacgagggcgcaatctccccggccgccgtcaaatcgaacgtacccagcccatgcacggtgccgtcaccggtcacctcgcaatagcgcacgccatcgattgtcgggaacgatactttggcacccatctgttccagatagcccggcaacaaaccacccggctgggtggtggtctcaggccaatgaggcacccggaccgtgccgccggcgatcaatgccgcgccgaggaatggcgccgcgttcgacaggtcgggctcaacggtcaccttgctcggcagttgcattgcgcgcggttcaaccgtccatgtgcgggcggattcgtcggcctcaaccgcaccgccggcaccggtcacatcagccacagtcatgcgaatgtgcggtaggctcggggtcttctcccccgtgtgcgcgaggtgcagaccgctaggcagtttggaactaatcagcaacaggccggagatgaactgggaagaaccggacgaatcgatgctgacctgcgcctgggcagacggcaaggttgcaggcggcgtaatagtgaacggcagacggccaacctcgccgtggtaatcaaccgttgcacccagctgttccaaaccgtcaagcaccggcttcatcgggcgtgcataagcctgttcgtcgccatcaaaattcactgggccatctgcaaacagggcaaggccgggcacgaaacgcatcaccgtgccggccagtccgcagaacacattgacgttgccatggaatcggccggatacaggaggagtaaccgttacggtggtgtcggttgcggaatccacgtcgcagcggacaccgagggcttcgagtgcgcccatcataaggtccgtgtcgcgcgaacgcagcaggccaatcagagtaacgggcttgctgccgagggcggcgagaatcaggtagcggttggatagggacttgctgcccggcaccgttaccgtagcgttcaacggctgtgcggcgagcggggcaggccagagattcgtgagtcgttcagtcataaggccaaatctatcaaacaaattattcaccggtcggcagcgatgcgggattcgatctgctgatcaggtgcggaagacggctgctcaaaaccgccttcgatggcctgcgcgtgcaacaactgagcggccgcgcgatcggcctcgatggcggcgatctggcgcgagaacacgatgaaccagccgaggaacgccagaccagccaacgcctccacattggtgagggtgttgtgacccatcatcatattgacccagaatgcagcgcatacgagcgcggtcaggtcggaggccaccatcactgctttggacaggcgtggcgcaagccacggcaggagcacgaacagcagcagcatgacgaacggcaggcctttggcgcatatattgtgcaagagattgtgtggcgtgtaccgaaacacgccgatgccgatgaatgccaggccggccaccatcagcaggaaggacagaatggagatgcgcagcatgaaatgtgggatttcgtagccgcgattcggatctctgttggtgcggtcgtgccagaggcgctgtagccgttcggtggtcaccagttcggagatggcgaagtagctgacgatgatgatgcatgtgccggcaagaatcagcgtggagttgaacatacgggccgcaaacgtggttctgtcgccgagctgcgaaaagttgttgtgataccagtatgggtcgtcggtggtcatgccggcggtgaccacgccggagatgacgaagaacggcaacagactggcaatagttttggcgttcatcatctccgcctgtacaaaggtcatgtaccccaccacgccggcgaaggcggcgcagacgctggagatatagccggagaagatggcattgcccatcatgtcgttggccgcaccgatgagtgcaaaagacgacaggaaaatggtcgaggcatacaccaccgaaagggcgacgatttcgaaaatgcgacgaatcggtgcaaaccaaccatgtttgaggttcaatgaacgtgatttgcgcgcatagccaataatgaaggaaatgacgccgcatgccgccacgatgcccgaacataccatgaatcggcgttgcgtcagctgccagatggccggcgcgtattccatgtacaggttcatcgataccgcgccaacgacggcgcaaatcaagaaggagatgagtccggaggtttctgcacgctgatgacgtcccatgccgggcctcccctatctattcgatgccgcgttatctttcaacaacaaacaaaactccccccgaggacaacgctttactagcaagccagcgggatttggctgtcgccattctactgaaaatctgaaacactacaaaaaaacgattatgtacgggcttcttagcctttgcgactatcgttaccgccttgccgagtaccgttgctcatgcagaaagaaagcagtattggacacaatcgaatgagcgtgtcggtatcgttgaaaaagtaatgaatgacggttctatcggttcaacctttaagggttgcaaccagttaacttaattgcttgctttcgattgttttcgtatgatatacttgagtcatgcgtgtcagggaatgggcgaggcgtgagggcttcaacgagcagacggtatggcagtggtgccgtgagaaccgcatgcccgtcccatttgagcgcatgagcacgggtacgataatcatccacgacccgaaatacgagagccagcccgtcgcccccacggcgaacggcaggacggtgtgttacgcgcgtgtcagctcgtctgaccagaaggacgatttgacacgtcaggccgaccggttgagggcgttcgccgtcaacatgggcgtcgagaagcccgaggtggtcacggagacgggttccggcatgaacgacaaacgacgcaagctcaaccggctgttggccgacccgaccgtcggcacgctgatcgtggagcatcgcgaccggctcgcccgtatgaacgcgggcttggtggagagcgcgttgaaggcgcagggcagacgcgtcgtcgtcgtggacgacacgggactcgacgacgatctggtgcgcgacatgaccgaggtgctgacctcgttctgcgcgagactgtacggacgccgcggggccaggcaccgtgcggagaaggcgttggaggcgatgcgcgatgagcgcgtatgaggccgtcagaatccggctcgacccgaccccacggcagacacggctgttggagtcccatgcgggtggcgcgcgtttcgcgtacaatctgatgctcgcgcacgtccggcgccaaatctccttgggtgagaaaccggactggacgttgtacgcgatgcgccgctggtggaacgagtggaaggacgaaatcgccccgtggtggcgggagaacagcaaggaggcgtacggcagcgcgttcgaatggctgtcccaggcgttgaggaactggtcggacagcaggaagggcaggcgcgcgggccgtagggtgggctggccgaaatacaagtcgaaacgctccagtgtcccgcgtttcgcatacacgaccggcagcttcggccttatcgaggacgacccgaaggcgttgagactgccacgcatcggacgcgtgcactgcatggagaacgccaccgaacgcgtccacggcagacgaatcgtgcgcatgaccgtcagtcgccatgcgggcttctggtatgcggccctcaccgtcgaacgtcccaccgaaagcgttccagcgaaaaacagaaaacggaagaaccatgatcgtcaggtcggcgtggatttgggcgtcaggaccctcgccaccctctcggatggcaccacgttccccaatccacgcaactacgtccgcacgcaacggaaactccgccacgcccaacagtcgttgagccgccgcgacaggggcatgagccatggatgcgggtcgaaacggtacaacagggcgttggagcgtgtgcgccgaatccacgcccgcatagccgcccaacgagccgacaacatcggcaagctcaccacgtggctcgccgacaattattccgacatcagcatcgaggacctcaacgtgcagggcatgagccataacaggaggcttgccaaacacatactggacgcggacttccacgagttccgccgccaactggaatacaagaccgcacgcgccggcacgaggctgcacgtcatcgaccgctggtatccaagctcgaagacctgttcgaactgcgggacggtgaaagccaagctgtccctgtccgagcgcgtctaccattgcgaggagtgcgggcttgtcatcgaccgtgatgtgaacgcggccatcaacatccaagtcgccgggagtgccccggagacgttaaacgcgcgtggaggaagcgtaggacagacccgccttgagtgcgggacaatgcggcatccggcgaaacgcgaaccaagcggcggcgacagtcgcgtgagacttggagctggtctcggcaacgaggccatgcagatgacttcgctctagcgacaagctaaaacaaagtcatctacaacggacgaaccagccgcggcaccatggcgctgatgcatgactatgccgagctcatcaatgaattacgtccgacagcagagcaattcaccgagatcgagcaatactgggtcaaacgaattcaggcgttcttcaccagcaaaccattcaagctggagtccgacaactcgctttccgttgatgcggccgtggaacatctgctgcggcaggcagcgcagcggcgaagggagaatccgggcaccatgtacgtcggcaccgtcctgcagcatctcgtcgcggcaaagctcaccatcgttgctccggaagtggaaatcaacggcgcgtccgttgctgatgatccgagtccgcggcttccaacggtgaggccgcggaccgtctcacaaaaccgtccgcggctccgccctcctgtttcgtcgcaactgactacaccgacgggttcgggcgcttcgtcacgaaaacgccattgcgatgcaccgtatacgcgccgccgtcactgccccgttccgcccggaacaggacgatcggctcccctgcgatgtcgcgcagttcgacatccgatctgccacgtgtcagatagaagtcgaatatggcgtcgtcggattgacgcacggtgtgcagaacgtcagaggtcacgccgctggcgggcgaccgcaggttggcttccggctgccggccatcctgcggctgcgcggcaagccagcctcccacgaatcgcgtcagatcgctcacgcccagatcgcagccgaggaaatacgcctccccttcgccgtacgtgttgcgggtgatcgcggccatgccgtcaagctcccactcatccgcttcttcgccggcatacgaggcaagcacctgcacatgcggtccggcgacggtcacgtcaccgagcttgtcgatgacgcgatcgagccagtcgaaatcccaatggtcttcgatgggctggaggcgatctcagctgaagatggcaagggccacggtgttgacgccggcctggcccatcaggcggatgtcgtcatcccagatttcctccggccattggtcgggactatagtcgccaccgaaagcgatgccgcgtccgtccgcggtcagcagttttggccatgcgaagtcacgtcatgcacgcacggttatctcctttggcaggcggcgcagggccacggcccatatcggataccagctgatactagctgatagacactcctggccgatagtcgacacgccgccggttccggccccactgccggaaccgacatgggtatgttcatgaccgccgaccgcaggaacgaacaggcccgtccgccacggaccgcatcttgcggttcaggcggacgggccttatgggagggatgggaacgggagatcagttcttaataactgcctgcgcctcatcgtcgacgatctcgccggaagcgagcttggcttcgagctcctcaacgatctgcgcatgcatcttctcatcgatcttgaccttgaaccagaacacgacgaggctgaggatgatgagaacaagcgggacgtagaaggcgaaggtcttgaacgtggcgatgttggacgcggtcatgtcggctgccgtggcatgaccggtcatgccagccgcgagggcaacggcaccgaccgcaccgttggacatcgcgccgccgatcttgtcgagcatgggacgcaccgacaaggtgaccgcctcgttgcgcttgccgttcttcagctggccgtactcgatggagtcggtcagcgacagaatcgcggtcatctggatgaactgcgcaggcacatagaagaagatcagggcgacgatgacgaccggcaggttgctggagaacagggcgagcatcgtgtagccgatgatcatggagaccatgccgccggtgaacaggtagcgacggggaatccagcggttgagaatcgggtacagcggcgccatgatgaatccggcgatcagcgggatgatgccggtgatggagaaggcggcaggctcgtcaagcacgaacacgaagaggtagtacatcacaccggtcgtgatgacgtttgcgatggcgtacagcaggtaggacagggcgacccacagcagctggtcgttctggaacagcgccttgaacgcctcgaacgggttgccgttcttctgggccttggcacgcagcgcgctggtgctttccttggtgccaaaggcgacggtccaggcggtaatcaggccgaggagcgcgacgatgaagccgaaggaggtccatccggcctggccctggcccttggcgccggtgaacgtccaggtgaagtagctgacgatcgggatgacgatgacggtgatgccgttgtagccgatagagccggtgaaggtgccaagggcggtgtaggtggaacgttcgtgggagtcggaggacaacgccgggatcatgccccagtaggagatgtcacgcagggagtagaacacgtcaagcacgatgaacgtgatgatgaacagcacgatgaacagcgtggtgttcacgttgaccagtccgaacatgccggagaagatgagcacgatcaacacggaggagaccagtccgccgatgaactgccacgggcggaaacggccccacttggtggtggtgttatccacgaggttgcccagcagcggatcgatgaagatctcggcgatgcggataacgacgatcaggccggtgatgacggcgatcatttgggcggcgagagccttgctgtagctgacgaacaggcagctggtgacgtacgtgacgaagtacgtgctcatcgcgttgtagaaggcagcctgccccaagttgccgcacgcgtaggcgatgcgctggcctaacccgcccttcctgcggacgtcaccgtccgcgacattttcgttgctcattaatcttctccttaagaacccagagcatggaatcactcattgattttgtaaagtaagcatacaagttttatcaccgtaagcatacaagttttatcaccgtaagcatacaagttttatcactgaaagtaaaaagcattggtaaacaaggagataaacagcgtgtcgcaaggatgggataacatgagctgaaccgagacattgcatggacgcggcgtagcgtcgacggcaagcagtgccagtgatttggaagcggtaaacaggatttgcgttttatataaaaactgtttatccttttcggtaaaggaggccccggcctcttccataatatcattcacaacgaggtaatgacagaaagcaggagagcatgacagacgtcacacatgtcgatcgcgcatcgcaggcttggctgaccgacccgacggtgttcgaggtgaaccggactccggcccattccagccacaagtggtacgcccgcgacccccagagcggacaatggtccgatctcaagcagagccttgacggcgagtggcgggtcgaggtcgttcaggccgccgacatcaacctcgaagaggaacccgcgacggccgagtcgttcgacgactcctcgttcgagcgtatccaggttccgggccacctgcagacggccggtctgatgaaccacaagtacgtgaacgtccagtatccgtgggacggccacgagaacccgttggaaccgaacatcccggagaacaatcacgtcgcgctctaccgcaggaagttcaccgtctccgcccccgtggcaaacgccaagcaggccggcggatcggtgtcgatcgtgttccacggcatggccacggcgatctacgtgtgggtcaacggcgcgttcgtcggctatggcgaggacggcttcacgcccaatgagttcgacatcaccgaactgctgcacgacggggagaacgtcgtggccgtcgcctgctacgaatactccagcgcctcctggcttgaggatcaggacttctggcgtctgcacggcctgttccgctccgtcgaactcgccgcccgcccgcatgtgcacatcgagaacacgcagatcgaagccgattgggatcccgaggccggcaccgcctccctcgatgccgcgctgaccgtgctcaacgcggccgacgcggccacggtccgcgcgaccctgaaggacgccgacggcaacacggtgtggcagacgacgggcgacgcggaggcgcagaccgcgatctccagcgggccgctgcagggcatcgccccttggagcgccgaaagcccgacgctgtacgagcttgacgtcgacgtcatcgaccaggcgggcgacgtcatcgaatgcacgtcccagaaggtcggtttccgccgcttccgcatcgaggacggcatcctgaccatcaacggcaagcgcatcgtgttcaagggcgccgaccgccacgagttcgacgccgaacggggccgcgccatcaccgagcaggacatgatcgatgacgtggtcttctgcaagcgccacaacatcaactccatccgcacctcgcactacccgaaccaggaacgctggtacgaactgtgcgacgagtacggcatctacctgatcgacgaagccaacctcgaagcccacggcagctggtccctgcccggagacgtcctcaccgaggacaccatcgtgccgggcagcaagcgcgaatgggaaggcgcctgcgtcgaccgcgtcaacagcatgatgcgccgcgactacaaccacccgagcgtgctgatctggtcgctgggcaacgaatcctacgtgggcgacgtgttccgcgccatgtacaagcacgtgcacgacatcgacccgaaccgtccggtgcactacgagggcgtgacccacaaccgtgactacgatgacgtcaccgacatcgagacccgcatgtactcgcatgccgacgagatcgagaagtacctgaaggacgacccgaagaagccgtacctctcctgcgaatacatgcacgccatgggcaactccgtgggcaacatggacgaatacacggcgctcgaacgctacccgaagtatcagggcggcttcatctgggacttcatcgaccaggccatctacgccacccagcccgacggcaccaggagcctgcgctacggcggagactttggcgaccgtccgtccgactacgagttctccggcgacggcctgctgttcgccgaccgcaagccttcccccaaggcccaggaagtcaagcagctgtactcgaacgtccacatcgacgtgacgaaggattcggtgtccgtcaagaacgacaacctgttcaccgccaccggcgactacgtgttcgttctgagcgttctcgccgacggcaagccggtctggcagtccacccggcgtttcgacgtgccggccggtgagacccacacgttcgatgtcgcatggccggtggcggcgtaccgcgccgacgcccgcgaactggtgctgcaggtttcgcagcgtctcgccaaggcgaccgattgggccgagagcggctacgagctcgccttcggacaggccgtggtgcccgcggacgccaccgcgacgcccgacacgaagccggccgatgggaccatcaccgtgggccgttggaacgccggcgtgcgaggcgccggacgcgaggtcctgctgtcgcgcacccagggcggcatggtctcctacaccttcgccggcaacgagttcgtgctgcgccgtcccgcaatcaccaccttccgtccgctgaccgacaacgatcgcggtgccggtcatggcttcgagcgcgtccagtggttgggcgccggacgctacgcccgttgcgtggacaacgtgctcgagcagatcgacgacagcacgctcaagggcacgtacacgtatgagctcgccaccgcgcagcgcaccaaggtgaccgtctcctacacggcccacaccgatggccgcgtgaacctgcacgtcgaataccctggagagcagggtggcctgcccaccatcccggcgttcggcatcgaatggacgctgcctgtgcagtacacgaacctgaggttcttcggcaccggcccggaggagacgtacctggaccgcaaacacgccaagctcggcgtgtggagcaccaacgctttcgcggatcatgcgccgtacctcatgccgcaggagacgggcaaccatgaggatgtgcgttgggccgagattaccgacgatcacggccacggcatgcgcgtcagccgcgccgatggtgccgcgccgttcgcggtaagcctgttgccgtactccagcttcatgcttgaggaggctcagcaccaggacgagctgccgaagccgaagcacatgttcctgcgcgtccttgccgcacagatgggcgttggcggcgatgattcctggatgtcgccggtgcacccccagtaccatatcccggcggacaagccgatcagcctcgatgtcgacctcgagctgatctgatcagaattgatccgatagtccaccgtgcaaacgatgtggcccccgacttcctcgcaggaagtcgggggccacatcgtttgcacggtccttgttagtccagcggatgcgccggatatcgatgcagatccaaacctagtcgttgtagagcatcaatgaataaagatgtcgctcataagctatcaagagaatccagaacctttttgaattcatatgctcgacacgcaatgtatccagcgtcgtttataatgattcattgtgccttaatggcgcatcgggctatagcgcagtttggtagcgcgcctgctttgggagcaggatgtcgtgggttcaaatcccgctagcccgacaaacaaaaaagcctggaatctcaacgattctgggcttcttcttttatccgaccgctaaacgatttatccggttttatccgatgaccgtagaacctatatggccttgcggtataagggacttttgtgatgttgggaccccaacctgctagtcagttcgattccatgcgacatcgatttccgcttcccaatctcaaatgacaccaaaatacctgcaaccgattgtgcaatcccgtgggcgggagtgggttgcaggtaaaaggtgtcgagttacagcccagaatcacccctaactagtaccgaaatacccgcaaccgcagtaactaacccctttatacctgcaatccggcaaatatggttcagacaatccgcacatccagaccgctatccgaacacaccgtttatactagatcacacatcgaatcaacatctagaaccgaccgtctccaacgacccatagggagagcacatggacgatataagaccacgctgcggctggtgcaatctcagcaatcccgtctatgttgcctatcacgatgccgaatgggcggttccgtcgcatgatgaccaccacctctttgagatgctggtgctcgagaccttccaagccggactgtcatgggagacgatactgaacaaacgcaagcgtttccgtcaggcgttcgatgggttcgacatcgaacggatccggcgctatgacgagaacaagatcgccgaactcatgaacgatccgggcatcatccgcaaccgtcgcaaaatcgtcgcgacggtcggtaatgccaacgcattccgggatatccagacgtcgtacggcagtttcgacgactatatttggcggttcaccggccgtcacgtcatctacgagacaggcatgactacatcccctctgtccgacgccatcgcagtggatctcaagacgtacggcatgcgattcatcggcaccaccatcgtctacgcctatctgcaatccatcggcgtcatcaatgcacatgagcctggatgcttcctgcacagggaaaggtgacccgcgcaaggatttataaggtcgctcgggcagaatctctccgagaggaacccgtgcttctagttattttgcttatcgagttcttggtagcgctctttgaccccggtaaggattccggcagattgttcacgctactgcgcggtgagcgcttcgagcagttcgccgaaagtcaacccaccttcactaccggatgacggataatggttttgagattttccggtttggctcggcgcgggtcggataggtagatctcgtgatggcggcgggcgtcggagaagtcgagcccgtagccttgcgaacgcgcgtagccgtccagaatcgtcacggttgcgggctcgtcgtcgtacgggcctttgtgcatgacctgcgcgaccacgccttcatcgaagtcgaagagatatgcacgattgatgtcgacttcgggatgcttggaggcaaacgatgccttggcccacgcaaagacctcatcggtcacgaattccggcagacgaatcatcgaagtccaatagaagtcggttttacgcgtgtaatcgacgccgggcacacccttctccatgctccataagccctccagcggaggcacggtgtagtcgaagtacccgtcaatgtgctcgtccggattatttgacttcttgttcattttgatggtgaacgaaatgccgtacagcagttgcatcgccttggcgtagtcgccgccttcttcgttcggatctcctacaccgtccaccgcgacgaaccgcatcgccggcaccgtgacgatggcgggcatcctcttcggctgatacaggtccttatattcctttttatagtcgaatgccatcgctcatttcccctccgccaccgcatcgatctcatcctgacgccgccaccgcttgaggtttggcaacagcgccgacatgcagtcctcggcctgttcgacgctgatatggcaggattccgccatcatcggcgcacacgcggcgaccaattcatcgctattggcataggcctgaagaaaaacgccgtcttcatagcagtagttgcaataatctccgtttcgcgttccatccggttcggtgccgtgatcttccgggcggtaaaacggcatggcacaactttggcaaaaaccattgtccggcatttccataagcctcgccatcggcacctcaaaacgggtgctgataagccgaatcatgtcgatgctcggctctgccgttcccttctcccagcgggaaagcgcctgttgggtgacgaacagctcgtgcgcgaactgcgactgcgtaagacctcgctcctcgcgcacgactttgataacctgaccgatcgacatgactacctcccgacatcggaaaacgattcgcgcgtctcgctgtgcgcttgctgattccagtctaagggcatgtcccgttcgccaagcgcgggtacaacaaaccgttgttcgcgcttgtatcccggaggaagaaacagctcggtcgaacctatttcctctccaccccttcaattctcccggttcctctgactcctttgcgagcgccgcggatgggatgagcacgcttacgtatggggttgcgccagacaggacgtcgtcgtagaagcgctgtttggcgtcgatgaagtcgatggaatcctggatttccgcgagctgctcgaccagccgcgcccgcttgccggcgagcatctacttgcgttcggggatgctcggctcgtggaggagcgtaaggggcgcgagtaggagttcgcggctttgctgcggtctctccctcacccggctacaccgggagctccctcgtcagagggagcttaaattcggtctggttataggcccatgggcttcttgggctttttggcgctcatgagcatgaggaagctgcgggactgggcggtgatcatgaagcccgcctcatagctcagcgccggctcattcgggttgtgcgtatccacgaccagctgccatttgcggccgtatcgctcatccggcagggtgaacataatcggctcgtaatgcgcgttgaagatcaggatgaagtcattgtcgaccatccggttgccgtaccagtcgacctccgggatatccgaaccgttcagatagatcatcatggagaacgcatgcgtgttctgccagtcgtccatatccatgatcgagccggtgtggtcgaaccattcgacctgcggaatcgtgttcgaatcgtcgccgggctcacggccggtgaagaagcgacggcggtgcaacaccggatgatccaaacgcagatgaatgagtttggaaacgaaggcgagcagttccttgcgtcctttgtcaagatgccagttggtccaagagatctcgttgtcctgacagtaggcgttgttgttgccctgctgggtgcgggccacttcgtcgccaccgcaaatcatcgggataccctggctgaacagcaacgtggcgaacatgttgcgcatctgacgctgacgcaagtcgttgacgtccggaatattggtcgggccttcaacgccgcaattccaagagcgattgttgctctcgccgtcgcgattgccctcgccattggcttcgttgtgcttttcgttgtagctgaccaggtcgttcattgtgaaaccatcatgcgcggtgatgaagttcacggacgccaccggtcggcggccgttgacctgatacaggtcggagctgcccatcaagcgcgaggcgaattcgggcaacgtggagggctgcgagcgccagaagtcgcgcacggtgtcgcggtagcggccattccattcggaccagctggacgggaagccgcccacctgatagccgccggagcccagatcccacggttcggcgatgagcttgacgcgcgagatgatcgggtcctgctccacgatgtcgaagaacgcggacagcttgtcgacctcctggaactggcgtgccagcgtggcggccagatcgaagcggaagccgtcgacgtgcatttcagtaacccagtagcgcagcgaatcggtaatcaactgcagcgcgtgcggcgagcgcatgagcagcgagttgccagtgccggtggtgtcgaagtagtgctgctggtcgccttccaccagtcggtagtaggaggcgttgtcgatgcccttgaagctcagggtggggcccatatggttgccttcggcggtgtggttgtacaccacgtcgaggatgacctccatgccggcgcgatggtaggccttgaccatggacttgaattcgttgacctgctcgccgcgttccccggaggaggagtaggcgttgtgcggtgcgaagaagccgatggtgttgtagccccagtagttcgacaggcccttctcctgcaggaaggagtcgttgacgaactggtggatcggcatgagttcgatggcggtgatgccgagcttcttcaggtattcgatgacgctcggataggccaggccggcgtaggtgccgcggatgtccggcggcacgtccatgttgaggttggtcatgccgcgcacgtgcgcctcgtagatcaccgaatcgtggtacgagatgtaggggtgctggtcgttgccccaatcgaagtaggggttgatgacggccgacttcatggtgtgggcggccgagtcaaggtcgttcatcgccgagttgtcgtccgggctcttgaaccagtatgagaacaggctttcgtcgccgtcgatattaccttcaatggccttggcatacgggtcaagcagcagtttgttggggttgcatctgaggccgtgcaccgggtcatagggaccgtagacgcggtagccgtaacgctggccaggatggaggccgggaatgtagttatgccatacgtacgagttccgttcggtcatttcgatgcgtgtttccacatcgtgctcgtcgaacaggcatagctcgactttctgcgcaacctgtgagtacagcgcgaagttcacaccggcgccgtcatagctggcgcccaacggatacattgatccaggtctgatctgcatagttttcagtatcccactttttttgtgtcagtgatgtgccggggagttgaacgtcaggagaacagcgacggcttatccttgtcggagttcctggcgatgagtctgcgtaacgcctcatgctggatggcgatcatcgaattggatgaggtgatgcgcgtggcggcaaggtcgctccacggaatccacgcggattccacatgctcgtccgcatcgaaatggcgctgctcccgcctgaacgggcccaaatgcaacaccatgatgtgggccagttcgtcggtcatgccttcggacgagtagaaatcacctacgaagtcaacgcccatggtgtcacggtccggcaccacgccggtttcctcggccagttccctcagggccgcgtccatgatgtcctcgccctcgtccatgagaccggcgggaagcccgtaggcgaacatgtccgatccggcacggtattcgcgttcgatgaggtaacggtcggtggacatgtcgtgcacgagcatgaccacacagggggcgtgacgcagcacctggcggccgatctcgtgttccttgccctgcttgtcggtcagagcgatgcgcatgtcgtccacgtggaagatgcgcccggtataaacggtttcgctactgatcactttggcgggcacgtccatgtcgatgccgtccgaggaggcgttcagcttatggtcgagccgatgctccagttgttcctgcttgcttccgccagacatgtcatctcctcggaaaaaacgtttttgccacgttactatagcgtcttaatctcgatgcgcggcaatggacagcgtccatggatcggtcgtgtcgtggaaccactcgacttcaggccttgctccggtcgcttgttcgatggcggctggcacgtcatcgatcgcgtagttgaaccacatggattcgatggcggcatgaggggtgttgatgaagcagggacgcacatggctctcccccgccattccatggccgagcatgatgccttgggccctcatacgggcttcataccgggcttgttcgatggcgtcggtcaccgggtggtgacgcaaatcgctggttacgtacacgtccacaccggtggcacgcacctcgttgaacagggagtccccggagccaggcagaatggccacatactgaacaaaagtgtccgaatcgccgcatacctggatgccgagcgcgctggtcatgccatgatcggacacttcgtcgaatactcgctgagcgaaatccttcagggcaacaggcttcggcaaacgacccacacgccccaagccgaccggatgagaggcgtttgcatcgtcaatcggcacgagtggtttctggtcgatgagtccgaagtagtcggccgccgcctgtcccacgccgcgatacgcagcgtcggcattagtgtgccctacccacagcccgcagccgtgctggtagagtctgcggacgatgtcgccccggaaaccgagtccgctcgtctcgtgtacggaacggaagaacaacgggtgatgggtgatgagcaggtccgcgccagtagcgatagccttgtcaatgatggcggaggtcgggtcggcggcgaacacgatgcggtgcacgtcgtgactcagatcgccgacaatgaggcccggctcatcccattcctcggcgtagcgcaatgggtacagggtctcgagaacgtcgatgacttgcttgagattcggcatatgtcccattgtagtgggctattgctgcaagggactcattctgcaattgcggacaagccatgctcgtgctcttcattgctcgactatcggctcgccttcgcctacaaacaatccactggactgtttgctcaacggctcagccccctcacccgaggggagctagaaattgtcagtgtgcagcgagttgccagtcggaaccgatgccgcacgatacgtccagcggcacggcaaggtcgacggcgtgttccatggcgttgcgcaccagttcggtgacctggtcgccttctcccggcgcgatttccactaccagttcatcgtgaatctgcagaatgatacggctcttgacgtgagcctcggccaaggtctgctcggcgcgaatcatcgcaatcttcatgatgtcggcggcggatccctgaatcggtgcgttgagtgccgcacgttcagcggcctcacgcgcaacacgattggtcgaatgcagggccgggaagtagcgacgtcgtccgaaaatggtttccgtataccccttctctcgggcattggccaccagcgattcaaggtaatcgtgcaccttgccaaaggtatcgaaataccggtttttcaacgcttccgcttcacgtggcgcgatcttgagttgctgggcaagaccatacgtgctcagaccataggccaatccgtagctcatggcttttacgtggctgcgctggtcgccggtgatctggtcgaccggcagcttgtagaccatcgaggccacgtatttgtggaagtcggctccggagcggaacgcttcgatcagcgcctcatcatcggacagatcagccataatgcgcagctcgacctgtgagtaatcgcagctcatcagggcctcgtacccctcccccggcacgaacacgccacgaatctcacggccggcggcgttccgattggggatgttctgcaggttcggatccacggagctcaatcggccggtggcggcaacggtttgctcgaaagtggtgtggatgcgctcatctgatgtgttggtggcatcgatcagcgtttggacgatctgcttgagcttgttgatctcgcgatggcgcagcaacgctccgaggaaaccgttggcccgctcattgtccactgatttgacatacagatcctgcaatgcggccgcattcgtggtgtatgagccggacttggtgcgtttggtgggtttcaaacccatatcttcgaacagcaccttctgcagctgcttggggctttgcaggttgatttcgatgccggcatactcccaagccatttcctgcgcttggcgagcctcggcggcaaactggtcacgcatggagacgagtcgaacgctatcgactttggctcctgtgtgctccatgccgtgcagcacgcgggaaacaggaagttcaatcgcgcgcatcagccagcattgttcacgctcgtcgataatcggcccgagcgtgacggcgaggctgcggataatggccaaatcacgcagacgaagttcgttcggatcttcttcgacctgatcgtcgtcgaagtccaatgtgccttgcgaaggctgttcggtttcggtgaagtggatgtcgaggaagtgctcggccgcctgcttgaggctatcggcgtggaaatccggttgggccagatacccggcaagcttggtgtcgaacatcggcaggtccaggtcaagatcgaccgcgcccagaagatgcagcaattctttatacccatgcacgatggtgcgggagtgttcgcttttcaggaactgcgcaagctgtgctcgcagggtatcggtgattggaagggacactatggccgctgatgttgccgtggcaacggcaatggcttgtgccgtggcacgccccggcctttcgtcgccccatgcggccacggtccaagcgtggccgaccgcgtcgccgcagatggcatgccgctgcgagccatcgccatagtcggaaaccgtgaaatcggcgatttcaccgggaaccttgacttcgacgcgatgggccttgacccattcgtcgaactgctccggagcagtgatgctcgtgggttccggcaggttcagatcgaggctgctatcctgctcgttctgctcattattcgtagactcgccagctccggatgtgttggatgccttggccccggtattgaaggttttcagtacacgactcttggtgcgaggtccgaattcaagctccttgaacagggcgtcgatctgcgccacgtccacggtgccgaatgtcagatcctcgatatcgacgcctagatcgacgtctcgtaccagtgcgttgactttgcgattgagtttgacctggtcgatattggcccgcagtgattcgccttttttgccgccgatttcatcggcgtgctcgcaaatgccgtcgagggaaccgaattggttgatccacttggccgcaaagccgtcgcctacgccgggcacaccgggaatattgtcggcggtttcgcctcggagtgccgccagatccggatattgtgcgggagtgactttgtatttgtcgatgatggactgcggcgtcatatgcttcaggtctttgaagtgatggcccgggtacaacacggtgacgttgtcatccaccagctggaaagcgtctcggtcaccggacaataccagtgtgtggtaaccggccttgtctcccatggtggcgagggtggcgatcacgtcgtcgccctcgaatcccggcttctcgatgtaggtgacgccgagggccgtgagcatgcgttgaatcaatggcagctgggtgagcagctcttcgggagccgcctcacgggtgcctttgtattgcggaagcatctcattgcggaatgtgccgcccttcacatcgaaggcgacgcccagatggtcgggcttctccgcgtcgatcacctgcgcgagcatggtggcaaaaccccagacggcgttggtggcttggccgctggaggtgctgaagttgtcgaccggcagggcgaaaaatgcacggaaggccagcgagtggccgtccaccaccagcaatgtttcattggtgggtacggtcacgctggcctctcccatagtgtgtttgtgttgctttacgactcggtacggcgacgctgataatcagcgttcgcccgaatcagaaggcttcggatcgccgtacttggcgatgatggcctgagccaggcgcttcttggggatgcgctggtccatggaggtcttctgaatccaacggaaggcaccctgctcggagaagtccgccttgtccatcagcagacccttggcgcggtcgacgagcttgcgctcctcaagcgtgtcttcggccttcttgagcttctcttcggtttccctgagctggtcggtggtttccttgagcttgcgttcgctgcgctccacgttgtccagcaaatcgttgatctcggcgaaacggcccatggccacctcgagggtcggcagcagcttggattcctcgtacggcttggtgacgtatgccatggcgccagcgccggtggccttcttcaccagatcggtctgggagaatgcggtgagcatgacgacgggggcgatgttttcatcgcagataatgccggcagcggtgatgccgtccatacgcggcatcttgacatccatgcacaccacatcagggcggtacttgcgggtcagttccacggcttcctcgccgttggcggcctgaccaacgacctcataaccgttgtcttccagcatggcgaccagatccatgcggttcacggcttcgtcctcggccacgacaacggtacgcggaccgtcctcgggcttggccttgcgctcagcaggttcgctttcattggccacggccttgagctcttcgtcggtcagcacctcatcgatgttgatactcggttcttcggacttcttccttgcagccatgccaacctctttcttgaattacccaacaatggggttcacaataatttcagcgaactcctaactaaagtgccctcggtgggactcgaacccacactgcgcagattttgaggctgcttcctctaccaattgggatacgagggcgtgccaaagcactctgaagagagtagcataccaattcgactcttgcgacacaagacacgcgccaatcctccattccccccggtgaaacaggcgaaacacgtcgatatcgcggacggcgcacccgtgtgttgcccgttctcctgcgtggtttcaccgcttacaatgggctgtagtttcgatgtatcgcttttgttaggagggcttatgagcaacgaaacttaccgtcagttcgatccctggcgcccctctccggtcaaggagatttcccgtagacagattgtggagacgcattatttcaatgtcgatcacgtctcctatgagtcgaatcaaatcggttcgtttgaacgctactttgttcaggagaacaatggcgacactgtggctgtgctggccgtcaccgatgatggcatgattccgctggtcgagcagtatcgcatcgccaaccatcgttggacgttggagattccggccggtcacgccaacaacccgtccgaacgcccgaccgatgtagctaagcgcaagctggccgaagaggccggtttcgacgccaccaagcttacgcagttcacccgttttatgaacacgccgagctattccacccagcacaccgcaatcttcttcgccaccggtcttaccccggcttcccgtcaggaaatcggcccggagactccgcgttccgacgtgcgtatggtgtcggtggacgatgcctatgagatggtggtcaatggcacgattgtggatgccaagaccatggtcgccattttgcgcctgaagagcggcacgctcgatcatctcaacgactgatcgccacgctcgatcaccgcggtgactgtgggccattgcaatcaccacacaatcgcaacataacagataacgaaagcccccatccactttggatgggggctttcgtgtgctatatgctagctgtcagcagctaccagaagcctgaaatcagtcgcaagcgccaacggtgtgcacgtagatggagtcagtgcggcccggctggtgatcgccctgagcagagctcaggatgacgatcttgtcgccgtcagcaaccttgccagcatccttgaggaccttgtccgtgtagaccatgagatccttgcgggacttgtcgtggtagtcctccttgagcaggaaggcttcggtgccccaggacagagccagccagtggtaggtgtgctcgttgctggtcaggccgtagatcggggcggccggacgctcacgggagacgcggtgcacggtggcaccggtctgggtgtaagcaacgatggccttggcgttgagcttgtcggccaggtccacagcggcggaggagacagcgccggtggaggacatgtcaaggttcttgagctccgggatacggtcgaagccgtggtcggtggcgtagccggagatacgggccatggtggccacggtcacatccgggtacttaccaacggcggtctcgttggaggtcatggtggcgtcggagccgtcgaggatggcgttggcgcagtcggaagcctctgcacgagtcggaaccggggagttcaccatggagccgaggacttcggtagccacgatgaccggcttggcgtactggcgagccagctcgatgatgcgcttagtggccagcgggacctcttccagcgggcactcaacggccatgtcgccacgggcggccatgacgccgtcgaaggtcttgacgatctcttcgaggttctccagagcctgcggcttctcgatcttggcgatgatcgggatgcgacggccttcctcgtccatgatctcgtgggcgcggtcgatgtcggtggcgaaacgcacgaaggacatggcgatgatgtcggcaccggtgcggatggcccaacgcaggtcggcctcatccttctcggtcagagccggcagggagacggcgacgcccggcaggttgatgcccttgtgggaggacacaggaccggccacgacgaccttggtgtacacgttgttgccctcgaccttggtgacctcaagacggaccttgccgtcatcgatcaggatcgggtcgcccgggtggcaatcgcccggcaggcccttgaaggtggtggaggtgatgtgctcgtcgccctcgacgtcatcagtggtgatgacgaattcctggccgagctgcagctgaaccttgtcttcgccatcggcgttcttcttgaaccaaccgcagcgaatcttcgggccctgcaaatcaacgagcgcggcaacgttgcgaccagtggcttcgctggccttgcgcacgttgttgtagaccttgaggtgatcctcgggggtgccgtgggagcggttcagacgagcaacgtccataccagcttcaacgagcttcaggaggttgtcgtaatcctcggtggaaggaccgatggtgtctacgatcttggctttacgcatgaatgcctgcctattcttgttcaatttggttcgaggcgcgattgccccatttgccgaaacccagtctactagcgcgagccgactcatgacaagttttcttcacggtgtgttgtgagcgctcacattgttgtgttgactgggtttaagggttgtattctctaacgatttcaggccttttcagcgctttccatgctcttcatcttgatcacggaagccacggatgcgccgccaattgcgagcacaatcacagccagcgacagccatgtgggcacctccggcacccaatggacgccttcgccgccgttgatgaacggcaaggtattgccgtgcagggcctccatgatgagcttgacgccgatgaagcccagcaccacggacaggccggcaggcaggtagacgagcttgtcgagcagagcacccagcaggaagtacagctgctgcaggccgagcagtgcgaacacgttggaggtgaacaccaggaacggatccttggtcaggccgaagatcgcgggaatcgagtcgaaagcgaacatgacgtcggtggtgccgatggtcaggaacacgatgagcatcggggtccagtaacgcacgccgttcttggtggtgcgcagcttctcgccgtcgtagtcgtcggtaatcttgatgatcttgcgcagattacggatgatgccgttctcgtgatattcctcatcttcatcgccgccgagcaccagtttgacggcggtgtagatcaggaaggcaccgaacaggaagaacacccacgtgaagcgggagatcagggccgcgccgatcagaatgaaaatgccacggaaaatcaaagcaatggtgatgccgatggacagcacatacttctgaatctgcttgggcaccgcgaagttcgacatgataatgacgaacacgaataggttgtcgatggacaacgagtattcggtgagccagccggaatagaactcgatggcgggcttggagccggcgaagaaccagatgcatccgccgaagatcagcgccataaccacgaagaaggcgatatgctgcacgcattccttggtggagggcacatgcggtcggcgcccgatgacgaacaggtcgacgataaagaacaacgcgagcaccacgaaggtgatgatttcaaatgcgagtggggtttctgccatgattccctacactaacttatgtatgtgacggttttggggccgttccggtagcgctgatcgccaggcagtcaggggatgtgttgttcgacacgctccgggccgctcaggcaagtctttacggtcgaacaacgcatcccctgactgcccgcctcgggtatgggaatttggttacttgttggcttccgtcatttgacggagttcttttttgaggtctcggatctcgtcgcgcagacgggccgcgagttcgaactggagttgttcggcggcggtgtgcatctgttcgctcagttggcgaatcaggtcggcgaggtcctgcgcgggcaggccggccttcaggatctcctcgtggcgtttgtctgcctcgttgggatcgagtaccggcacgcccaggtgcgtgttgccggccttgcctgcgttgcggtagccaccttcaagcaaggtctgggtgtccacatcctccttggcgagcatgtcgttgacgtcgctgatcttcttgatcaggggcttgggatcgatgccatgctcctggttgtaggcaatctgcttggcgcggcgacggtcagtctcgtcgatggcttgccgcatggcttcggtggtctcgtcggcgtacatgatcaccgtgccggacacgtttcgggccgcacggccgatggtctggataagcgaacgataggagcgcaggaatccttccttgtcggcgtcaagaatcgccaccagcgatacttccggcaaatcgaggccctcacgcagcaggttgataccgacaatcacatcgatcttgccttcgcgcaacatgcgcagcagttcgacgcggcgcaacgtatccacatcggaatgcaggtattcgaccttgatgccgcgttccagcagatagtcggtcaagtcctcggccatcttcttggtcagagtggtgaccagcgcgcgctcgttcttggccacacgggccttgatctcggcgagcagatcgtcgatctgccccttgaccgggcgtacgtcgatcttcgggtccagcagaccggttgggcggataatctgttcgaccaccccatcggacagtcccatctcatagtcgcctggcgtggcggacaggtacacggtctggccgacgcgctgcaggaattccggccatttgagtggtcggttgtccatcgcggagggcagacggaagccgtgttcgaccagcgtgcgcttgcgggaggcatcgccctcgtacatggcaccgatttgcggcacagtgacgtgtgattcgtcgatgaccagcaggaagtcgtcagggaagaagtcgagcagcgtgtgcggcggggtgccggcggcgcggccgtcgaagtggcgcgaatagttttcgacgcctgagcacacgccaacttgggtgagcatttccagatcgtaggtggtgcgcatgttgaggcgctgcgcttccagctccttgccttgtttgcgcagttctgccaggcgttcttcgagttcctcgcgaatggttttgagcgcccgttccatgcgttcggggccggccacataatgagaggccgggaagatgtggacttcgttttcctcgtcgatctcgtcgccggtcagcgggtgcagcgtggagatgcggtcgatctcgtcgccgaagaattcgatgcgcacggccagttcctcgtagaccgggatgatttcgaccgtatcgccgcgcacgcggaaggtgccgcgcgtgaaggcgatgtcgttgcgcttgtactgcatggccacgaattggcgcagcaggtcgtcgcggttgatttcctgcccgactttgaggaagagcatgcgaccggcgtattcttccggcgtgcccaagccgtagatgcaggagacggtggccacaaccacgcagtcgcggcgggtcagcaggtttgcggtggcttggtggcgcaggcgctccacatcgtcgttgatgttggagtccttttctatataggtgtcggtctgcgggatgtatgcctcgggctggtagtagtcgtagtagctcacgaagtagctcacggcgttgtccggcatgagttcgcggaattcggcgcatagctgcgcggcgagcgtcttgttgggctcgataatcagggtcggtcgctgcagcttttcgatcagccaggcggtggttgcggttttgccggtaccggtggcacccataagaaccacatcattctcgccgttttcgatgcgttcggccagttcggcgatggcctgcggctggtcgccggatggcttatatggcgatttgacgacgaaaggcttgtccgcgcgctcgatattgaatcccatagggcctcatcttagcgacctgcgcaccatcctgcgtatatctcacccacttgggccagcatctcgggcaatggatgggtggagtcgatgacgatatcggctatggcccgccgctcctcctcactggattggtggcggatgcgggcctcggcctgttccaggctcatgccgcgttcctcgaccatacggtcgagccgcatgcacacgggagcttcgaccgtgacgatatggtcaaaggcgaatggaatatcgtcaatgacctcggcgagcagtggaatgtcgtgaatgatgatggctgcctcggggtgctcatgctccagtcgcgccgcctcggcatagatcaatgggtgctcgatggcgtcgagccgttcacgtgcgcccggcgcggcgttcgcgccgaagacatgatcggcaatccatggccggttcatagtgccatcggcgagcaatgcatcaggaccgaactcggcgacgatctgtggcagcgccactcccccgggttcgacgatctgatgcgccagcgcatcgtagtcgatatgcaacgcgccgagttgcttgagtcgcgccgccaccgtacttttgcccgcggcgatgccgccggtcagtcctattcgcatcatggtgcccatgatagctggcgctcccctcggccggttatcgccgacagctcccctcagggaggggagccggctcgcgtagcgagactgaggggagtcattggcggataactccaaaaacacaagaaacccggcccaatcggaccgggtttctttacacgctaagcgctagcttcgcggcaaactcacttgccgagcagctggtcgcgcagggcggcgagctgatcggagtcggcgagggtaccggtagtcggagcagcggaagagtagttggaggtctcctcgaccggcttctcttccttcgggccctggccgtcggcggctgcggattcggcagcgttctccagctccttggccacgaactccttgtgctcctcccacagctcgtgagcggcggcgtactgagactcccactcctcgcgctgcttctcgtaaccagcgatccactcgttggtgttcgggtcgaagccttcggggtacttgtagttgccctgctcgtcgtactcggccggcatgccgtagatggccggatcgaagtcctcggaagccgggtcaacggagtcgttggcctgcttgagggacagggagatgcggcgacgatcgaggtcgacgtcgatcaccttgacgaacacggtctcgcccggcttgaccacggtctccgggttctcgacgtgacggttggcgagctcggagatgtgcaccaggccctcgatgccgtcctcgacggagatgaagacaccgaactggacgatcttggtgaccttgcccttgacgatctggccgggaacgtgggtgcgagcgaagcgctgccacggatcctcctgagtcgccttcagggacagggagatacgctcacggtcgagatcgacgtcgagcacctcgacggtgaccttgtcgccgaccttgacgacctcagacgggtggtcgatgtgcttccaggacagctcggaaacgtggatcaggccatcaacaccgccgagatcgacgaaagcaccgaagttaacgatggaggacaccacgccctcacggatctggcccttcttgagctgggacaggaaggtctcgcggacctcggactgggtctcctcgaggtactggcgacgggacaggaccacgttgttgcggttcttgtcgagctcaaggatcttggccttgatcttctggccgatgtacggggagaggtcgcggacgcgacgcatctcaacgagggaggcaggcaggaagccacgcagaccgatgtcgacgatgaggccgcccttgacggcttcgatgacggtgccctcaacgacgccgtcagcttccttgatcttctcgatgtcgccccaggcgcgctcgtactgggcacgcttcttggacagaatcagacggccttccttgtcttccttggtgacgacaagggcctcgatggtgtcgccgacctcgacgacttcgtcaggatcaacgtccttcttgatggaaagctcgcgggaggggatgacaccctcggtcttgtagccgatgtccaggaggacttcgtcgtgatcgatcttgacgacggtgccctcaaccagatcaccatcatcgaagttcttgatggtggaatcgactgccttgatgaagtcctcttcggtgccgatgtcgttgatggcaaccttggtgacttcagtgttgttctctgccatgtaaatatatggtttctaatagtggatggataatttctcgatattcagttatacgcacaccctacaggcatacagatactcacaatacaagcaactctgcccaaatttcctaggaaactctaggcgtgtcgttcggccatttccacgacgttggctaggagcatggctcgggtcatggggcccacgcctccggggttgggggtgtaggcggaggccttgtcgtagcaggccttgtccacgtcgcccttgatgcggtagcgaccggcttcttcgtcgtagacgcggctgacgcccacgtcgaccagcacggcgccgtccttgattttgtcgggcgtcacgaatccggccgaacccattgcggcgacgatcacgtcggcgcggcgcatgtggtcggccacatcccgggtaccggtgtggcacagggtgacggtggcgttgacggcgttgcgcgtgagcattaggccaatcgtgcggccaatggtgatgccgcggccaagcacgcacacttccttgccgttcagatcaatgtcataggcgtcgagtagctcgagcacaccgcgcggagtgcaaggcagcggcgtcgaaatgtcgccgcgcacatgcagcaccagttcgccgaggttgtacgggtgcatgccgtcggcatccttggccgggtcgatcatgtcgatgatcgcgttctcgttgatgcccttgggcaacggcagctggacgatgaacccggtgcaggccggatcttcgttgagttcgcgtacggcagcggcgatgtcgtcgaagctggcgtccgccggcagttccttcttgactgaggtaatgcccacttcctggcaatcggcgtgcttgccggccacgtacttcatcgacccggggtcctcgcccaccagcagcgtgcccagccccggttggatgccctgcgccttgagcttgttcactcgctcggcaaggttggtcttgatttcggccgcaatctgcttaccgtcgatttttgtggacatcaacgccctcccctgtagtttcggtgcattctatcgaaacgataggctatcgttggaacaagtcaggattatatatcgttcgctctcacgaagaaggcgtgccatggggactcaaatcacacgacttacgcgactcgccgcagccggcctgagcgccgtcctgttgttcgcgaccaccgcatgcgcagccacctcccccgctgaaaccgagccggacaacaagaccagcgttcccgcaccgaccgggccgatcaatgtggtggcctccctcaatcaatggggctcgctggctgccgagctgggcggcgatgatgtggaagtcacgtccatcgtgaactccaccaatgtggatgcccacgatttcgagccaaagacctcggatgtcgccaagctgtccaaggcccaaatcatcgtggccaacggtgcgggctacgattcctgggccaccaaatcgatgaccaagaccacgaatatcgtatccgccgcttccgtcatgggtgccgtcgagggcgataacccgcatctgtggttctccaaagacgctcgatccagcatggccacggccatcaccgatgcatatataaaggcactccccagcaagaagaaggccttccagaagcggctcaaggcatggcaggcggacgagaaatcgttggaaacatgggcgtccgagttcaccaagtcccactccaacctcacctatgcagccaccgaacccgtggtctattatctgatggccgatcttgggttcaaagatcagacgcccaaggggtatacgcaatcgaccgcttccggcggcgaaccggcacccgcggacctgcagtctttccagaaactcatcgaagacaagggcgtggatgtgctggtcaacaacacgcaggaagccagtgacgcgaccaatatgatcactggcgctgccggtcgcgccgatgtgccggtagtcgacgtctccgaacaaatgcccaaggatgccgacacgctgaacgcctggatcaaccagctcatcaacaccatcatcgacgcggtggatccaagctatggctgcgaagacgccacggacggcgataccgcggacagcaacgcgaattccgatgattccagcgccgaaggctccgccacggatgatgccaatgcgcaaggctccaaggccagcaccggttccagcacggagcccaagtacatccgtcagtgcaaggcggccgcatccagtgactcatctcaggattcggcaaaggccgatgccgccaatggcgatcccggcgatgcctccggcaacgaccagaccgactccggcaaatagttagaagcaaaggacaccggcatcggattcgcgccaatgccgatagacgccttgcatgagaagggttgtgcgaccattgtcgagatggccgcacaacccttctctttggttatcaccatccgtacacgatattgagaacgattgtcagcatcgtttgccacaatcgggcgttatgagtgaaacttccgattgcatcgtgttcagcgatgccgccatcaagcgtggcgaccatatcatctggcagcatggcaccttcgccattcccaccggttcggtcacggccatcgtcggcaccaacggcaccggcaaaaccacgatgatgagggccgagctgggccttttgccgctctgccatggcagcctgaccgtgctgggcaagcccgcaggcgagatgaacaaacgcatcggatatgtgccgcagagctatgtggcgaatgtcgattccaatctcaccgccgaacaatccgtgttgctgggcctgaccggcacccgattcggcatccaccccatcaccaaggcccagaaagccaaagcgctcgaggcgctggagttcaccggcatcgccgacaaggcgcggtaccgtctgtccgaactgtccggcggtttgcgccagcgtgtggccatcgcccaggcgttggtgtgcgacccacaactgctgatgcttgacgagccgttggccaacctcgatctggccagtcagcgcgccaccgtacacgtgctggccaagctgaaccgtgaactgaacatgaccatccaggtggttgcgcacgatctcaatatgctcttgccgattctgaccggtgccgtctacttgctcgacggtcacccgcactacgccgatatgcacaaagtgctcgactccgacctactcacccacctctacggcacacaggtgcaggtggtcaccactccgcagggagacatgttcgtgaccccgacgccggatgagctccaggaccagccgcaggatatgcacacggcagccgaagtggcgcaattgcaccatcacgagcacggcaatgccaccaatggcagtaccgccaacagcgccgagaatcgataacatcaagcgagccgacccacagcccatcaacggactgtagctcaggcatggagaaaatacagagacatgagcaccatcaacttttcgtatgatcccgaatggctggatacactgtccgctccattcatgaccaacgccttcatcgccggcctgtgcattgccctggccgccggtgtcatgggatacttcaccatcgcccgtcgttccaccttcgcggcccatgcgctggcccatatcggtctgccgggcgcgaccggcgcggtgttgctcggcctgcccgtgtcactgggcatgggcgtgttcgcactgggcggcgcactggtgatcggtgctttgggcaagcgcgtttccgagcgtgaaatcgccaccggcaccgtgctggccttcgccaccggcttgggtctgttcttcgcgcgattgtcgagttccgcctcccagcagatgcagtcgatcctcttcggctcgatcctgaccatcaccaccggccagatcatcggcttcgccgtgttcgacgtactgctgctggcattgttggccatcatctaccgcccgctgctgttcagctcgctggatgagcaggtggcacaggccaagggtgtgccgatcgggctgatgaacgtggcgtttatggcgattatggccggtgtgatcaccatcgccgtgccggcagtgggcaccttgctgattttcgcactggtgattacgcccgcggccaccgccaatattctggccggctccccattcaaggcaatggtgatcgccagcgtgctgtgcttggtgtcgatttgggccggactcgtgctgtcggcgatgttccccgctcccccgagcttcatcatcgtgacgctttccaccctgttctgggctatcgccaaagccgtgaagacgatgcggaagtaatctcatccattttttcttgcccccgctggcgaattcatagcgggggctttgttatatcttctccaccaaggcattggcgatggcggcgatgccttcgccgtggccagtgaatcccatatggtcggtggtggtggcggtaaccgataccgggcaaccaaccgccgcagacagggcggcttcggcttcagcacggcgtgtgccgattttcgggcggttgccgatgatcgccaccgaggccgatgccggcgtatacccgttggatgccagatgcgccacaacttcttgcaacatatcgatgccatgcattccggcaccatgcgcgtccgcaccgacaccgaacagtgaaccaatgtctcccaatcgggcggcggcaagcaacgcgtcaatcagagcgtgcgcggccacatcgccatcggaatcgccttcgataccctcgtatttggcggcatcggcctcgctgcatgaatcaggcaccggccagtagagcccggcaatccacagttcacggcctgagccagcaggcgcaaaacggtgagcgtcaaaaccttgccctatcagcactcctacagaccccatgcagtccccttcgatggcgttgcccagacgaacggcagcaaacgattatgaatcacgaagccccggcgcatcgcataaggacacgaccggggcctcaaaacaatcaaatcacttcttcttggacttcttctcggcttcaacacgagccaaagtatcggccgcggcctcttcgggctcggcggtgtgatgcttgtcgtcaccgggctgagcgggctcgtagcccagattcacgtcgagcagacgctgggcttccgcctcgtcgatcttctcggacaaggcgatctcagaagtcagaatggcacgggccttggtgagcatgcgcttctcgcccgcggacaggccgtgctcgtcgacatcgcgctgagcgagatcgcgaaccacttcggcgatcttgttgacatcgccggtggcgatcttttcgacgttcagcttgtaacggcgagaccagttcatctctttctcgatgatcggggtccgcaggatgtcgaacaccttggccacttcggatgcggagacgatgtcacgcacaccgaccttcttggcattgtccacgggaacgttgatgaccaaaccatcggaagagagtacggacaactgcagatattcgcgcgtcactcccttgaccgtccgctcggtaatggcctccaccttcgctgcaccatgacgcggatagacgaccatatcgccgactttgtaagacatgtaccctccgagaactgacggcttacacacgaaaactcgaatgattatgccatgcggtctggaccacccctatgagagcgctcacaaccacggaaacacaacgaaaagggcaagaattcgccattttcgacgcgccaatgtagcgttttcgacttcaacgcacgtagactttgggacatgtctaaagaaacgaagatcaaggaagataccgtcaccgtgcctgtcgcccaaggcgacctcgatgcgacgagcaatgctgaattctacaacccccacggagttctcggcgggcatctcggcatcggcaagcatgccgacaccgccacaatccgtgtgctgcgtccgcttgccaagtccgtgaccatcctcacccaggatggcgaatacccgatgacccacgaatacaacggcgtgttcgtggttaccgtgccggcttccggcactaagaagcagcccacgattcccgactaccgtgtcaggaccgagtgggaaagcggcgcagtgctcattgaggacgacccatatcgctatatgcccacagtcggtgacatggacacctatctgttcggcgagggccgtcacgagaagctctgggagacgcttggcgcgcatgtgctgcgctatgacgatccgatgggcggcgcagacggcacgcccggcgaacaggtggtaggcaccgcattctccgtgtgggccccgaacgcccatgccgtgcgcgtagtcggtaacttcaacgcttgggatggccgccgtcatgccatgcgcgagctcggctcctccggcgtgtgggagatcttcatccccggaatcggcgcgggcgagacctacaagttccagatcctgaacgccaattacacgtgggagatgaaggctgacccgatggagcgtcagcacgaagttccgccgagcaccgcctccatcgtcaccgaatccacctacaagtggaacgatgacgcctggatgcagcaccgccgcaccaccaacccgcatgatggcccggtctccatctatgaggtgcacgccggcagctggaagcagggactgacctaccgcgacctggccaagcagctcgtggactacgtcaagcaggaaggcttcacccacgtggagttcatgccactggcccagcacccgttctccggctcctggggctatcaggtcaccggctactatgcggtcgactcccgtctcggttcccccgacgacttccgttacctggtcgaccagttccatcaggccggcatcggcgtgatcatggactgggtgcccgcccacttcccgaaggacgccttcgcgctcggccgcttcgacggcaccccgctgtacgaggacccggacccgctgcgcggcgaacaccctgaatggggcacctatgtgttcaacttcggacgccgcgaagtacgcaacttcctggtggccaacgccctgttctggcttgaggacctgcacgtcgatgcactgcgcgtggatgccgtcagctccatgctctacctcgactacagccgcgaacccggccattggcgcccgaacatctacggcggacgcgagaacctggaggccatcgacttcctcaaggaggccaccgccaccgcgtacaagaacaaccccggcgtcatggtgatcgccgaggagtccaccgcatggccgggcatcaccgcccccacttccgccggcggcatcggcttcggcatgaagtggaacatgggctggatgcacgacaccctcgagtatctgcacgaggagcccatcaaccgcaagtggcaccacaacgagatcaccttctccatggtgtacgcctactccgaacattacgtattgcccatcagccacgacgaagtcgtgtacggcaagggctccctgtacggcaagatgccgggcgatgactggcagaagctggccggcgtgcgttcgatgttcgcctatcagtgggctcacccgggcaagaagctctccttcatgggcaacgagctggcccagtggggcgagtgggatcacgacgcctccatcgattgggattgcctgaactggcaggagcaccgtcaggtccagaccatggtcgccgaccttaacgccttctacaaggcgcatccggcactatggagccaggacttcgacccggccggcttccagtggctgaccagcgacgatgccgaccacaacactctgagcttcctgcgcatcggtaccaagggcgagaccttggctgtggtggtcaacttctccggtgaggcctggtccgattaccaggtggcgctgcccaccggcggcaagtggaccgaagtgttcaccaccgatgacgccaagtacggcggctccgacatccacaacggcaccttcgaagcggtcgagggcgaatatcattcacgtccgttctcggcgaagatcaccgttccggctctgggagttgtattcttgaagccggaagactgaactggtcaacaggctgaaaggtaaccggtttatttatgctcaataccacagcgcgtcagaatacgacaccgcgcacggtgctggtggtcgaggacgagcccacgctcgccacggccatcgcccagcgcatcaccgctgaaggatggaccgctcgcgtggccggggacggcgcttccgccgtccaggccgcgtcccagctacgccccgatctggtgatcatggacatcatgctgccggttatggatggtctagaggccaccaaacgcatcgtcgccgaacgtccggtgccggtgctgatcctcaccgcacgtgatgacgaggccgacaaggtcatcggtctgggagcgggtgccgatgattatatgaccaagccgttctccatgcgcgagcttatcgcccgctgcaaggcgctgctgcgccgcgtggagcgtgcgaaggtcatcgccaagaactcggagaacgagaagctgctcgacttcggttcgatggtcatcgacccggcccagcgcatcgtcaccgtgaacggcgaacaggtgcatctgacccccaccgagttcgatctgctggccacgctggcccgccgcccgaagtcggtgctcacccgcgaaaagctgctcgaagaggtctgggactgggtcgacgcatccggcacccgcaccgtcgacagccacgtcaaggcgctgcgccataagctcggtgccgataccatccgcaccgtgcatggcgtgggctacgctttcgagccgccgaccgcgtgatggcatccaaaaaacaacagcaatcccggcttgatgcgatgaaacctcgcgtcaagccggttgatttgttctcatctctgaagctggaactcagcgcactgatcgttatcgccactgccatcgcgtttgccatgtgctggttcctcctgaaattcggctggtccggttggatcgccatgccgctgactttggtggtggccttgggcatcacctatttcttctctcgcggcatcaccgctcccctacgccagatgcgcgatgtggccgaagccatggcggatggcgattacacggtccgcgtggatatcgatcaggatcgtcatgacgaggtcggcaagctggctcgctcgttcaacgagatggccggcgaactcgagcatgccgataaaatgcgccgcgacatgatcgccaatgtgagccatgagctgcgcacgcccgtttccgctttgcaggcgatggtcgagaacatggccgacggcgtcaccgagcccactcccaccaatctggagagcatcctcacccaaacgcagcgtctctccgatctcatcgccttcctactggacctgagccgtatggaggccggtgcggcgagtctgaatatcgaaaagttcaacttcgccgactttcttgacgagaccatcgagccgttggaaatcgccgatggtggccacgcccacgacatccgcgtcaccgtgccggccgacatcacgatggaaggcgatcaggaccgcctgcgccagctattcaccaacatcatcgccaacgcgctgaaacattcggccgacggcaccaccgtgctggtcgacgcccacgaggacgaaaaccaaggcaccatcgtgaccaatgtggtgaatttcggctcccagattgcgccttccgaccgtttggacatcttccggcgctttgtcaaaggcaagacgggtcccggcaccgagtcgggcggcaccggtcttggcctgtccatcgcgcgctgggcggcccaattgcacggtggcaccgtcaaagtggtcgacgacacgcgaggtgccgatttcgaaatcatcctgcctaaatatcacatcgccgaacgctgatattgtccgacgtcctaccgtatactgtattcgaacagatgttcgaatacagggtgggaggcgcagcatgacacagcaatccgagtcacaggccatggcgcacgaggccacgctgtttgttatgcagatggccggcgattccatgatcaatgcgggtattcacaacggcgatctgctgattgtcgatcgttcgttggcaccagtccccggagatgtggttgcggctgtcatggacgacgaaatcgccatcaagcggctggtttcacgggccggcatcaccatattgcacgccgagaatccgcgataccccgattacatgccgagcaacggcgcttcgcctgctatctggggcatcgtcaccgatgtcattcacccgttgatatcgtcatcggaccgtcgcaccacggcatccgccaataccagcacgcccaccaccttggtgccggcctgctgaaacgcctgaacgcattgccgcacagtggcacctgtggtgacgatatcatcaacgagaagcaccgcgtcgccattgccgatgagatcacgcttcaccctgacatgaccggtgatacgacgggcacgctgtgccgaagagacctgctgcacggagcgtgccttggtggaggagctcagggcattgcatggtcgcgcatcgacgccgtacccacgcaatgcccctgccaccgatttggccaacggtgccgtatgggcacgtcctcttcggcgcattgacgcccgcgatgatggcaccggaaccaccaatacgcgatgacccaagcatgatgatggtattggcgtcttgttcagcagcgacaccatgatgcggccgaacgggccgtcaagctcggtatcgtcgtggtccttccagtcgagaatggcacgacgtaccgctccctgataaatcgatgcggaccatatacgggctccgccaccactgtctgcatcccgttcccggcattgcgcgaacagggcccagcatgccgcacacaatacctcatccggcgcgtcacacccagcgcagccgcgtggaaacagcagattgcagacctgtgcccacatcgcatgccaccacttgtatacgctcggcccgtccataacgcgtcactatcgagctggagtatcgaatcgcgcaagcagtgcatccagcagttgtaccgtatcttgcggattctcaacacgaacaccgatcgcaccggcctcaaccgcgggatagtcattacccgtaggcgtcatgcgatcacccacgaacaccatttcatcggcccgtatgccaagtgtctgcgtcagcttgcgcacggcataggccttatcgatgccgcattcgctgacatccacactggtgtatccgccggccctggcccgcatatgcggcagatcggccttgaccgcttcgaccagcgcctgtttcttcgtgttatcgcgatcccatgcctgcttggccgctacgggcgcgaactgcccaagagcggagaaggtgatctggctgcccctgttctcgattcgaggcccccatacctgctgttcccacaatcccagttcccgggcatgtcgctcaagactttccgagacagcggccacggtggcttcggacagatcatgcgcatacaccaaggcccattgcgtgccatcccaccggtaataccgggagccggaggtaggcatgacatgcagattgccgcgcctggcattcggggtgagtacatccagcacctgcgaggtgaccaccgccatgccgccccctgagatcagggccaccaccgtatggtcgagcaacgcacagaaccgttcgatcatcgcgggcttcatcggctgttttgagctggccagtgtgttgtccaaatcgaaaccgaacaccttggcgttggagcagacattatcgaaatcaagttcggaccacgaacgtaccaccatttgtcgtgcctccctcgttgacgaatgttcacagccaatgaaccaatcctaacgcatgttgcctccgccatgccctatggtgggaaccatgcttcagccaccttggaacgcacgaatctaccgcaaccgccacggtcgcggcacacgaaccccgatgttcggcacccgtctgccccgttaccgcactcgcaccggcatgttcgacgatatggtggcggcccaggttcgcaggctcggccaagcgtggccggaactgatacgtccgctccagttcgcggtggaggatgtgccgccttcggatccgacgccttggcagaccgagccgaatatgacgtcccagtgcttccccgccagccacggcattcccgcacgagtcgtgctctaccgcatgccgttgcagaccgaggcacctaccaagctcgaactgcaattggccgtcagggatgagctggtggcccgcatagcggaattgtatgggcgcaggcccgaggaaatcgaccccgactggggcctgtgacaacactgcgggccgtgtcacttgtaataaggtagtggcacggcccgcagctatatcgccgccgaaacatcatcagactgacgcttcggcgagcatacccttctacttgacgatggaggaatcgttccgagcccagacatgaaccgtggcgggcatcagcgttgaagcgtcgatgacggacaatccggcgatgtccttgtcttgcaacgaatcgtgactgaaccgcgctccccagctcactttcttggatgagtcctccaacatcagcacgaccgcggtgccatgatcgccggaaagattgccggcttcaatcgtttgtgctgcgttcgcatccagtgtgatttccttggaggttaccgaagcaccggcatcatcgtaggcgcgcaaggtgaccgtcctgcgcgcattggacgtattggccagcgtgatggaggcctttactccgtcgggaagggccaaccccgagaattcggatggctcgccggcattgaccaatgcgaaatcggcttggccggagtcaccggagcgtgtggccttgacggagaacgacacggcgtcctctgcggtggacatcacgcccaacgccccatcaggagcttctcccaagtcgatcgccgtcactttatcagcagtgacggtggcatctttggcgggaaccaagcctttggcggtaatccatgacagcccggtgctggtgtctgccttggcgaacagataagcggtgaccgcatcgccggcagtgatggacggcgccaccgatgcattggatgcggtcggcagcggcagcgcgaaatcagaacccttcggtgtcagaccatccatggtcaccgtgcgcaccacggacgcgataggagtctccttgctggaaacggtcacgaacagaccatgctgcccatcgaccgcggcggacagttccatcgaggactccccctcggctggcacagacagcgtggattgggtggacaatgccattttcccggctgtctcggaaccccagacggcaatgtcgacggtggtcggcttggtggagagattcgagacgatgagctgctgtgtggtaccggtcgtgctgtcggagagcaggaacgactggctgagcgaggtcgatacgcaggatgccgccgatatgcctctcacatcgccatcatcggcccatgatgcgatggtgccgacggtgccggtgccagctgcggcctgcagcatacgggtattgatcagacgagctccctgattgatcttctgagcaccggttttcaccgaggaatcgtcggtcgaatcggcgtctttcaaagttacgtcatctgaactggacttttgcccgatcgccgagacagtggcgctgtagacggagccgaacgccgcatagcgcgcttgtgtgctcagattgccgacagtggcctggaaggcgctgtcgccgtacgtgccggtatcggccaatcctataggtgccgggcagtaggtttcggactgggtcggactaacggtctggtcgatggcattatcggaagcggccaccttatccacccagatattggggatgggggccatgacgagaacgacgaacagcgcaatcaacaccagcatggtgatcacaccgagcacgatgccgatcgcacgtttgaaaccagaagttttgttgctcatgcctgctcctccaatccgtaggacggtcgtctgcgaggcatggcgaccaagcagtacaacgccgtgatcacacctaggcatatcagccaggcgtgcctccagacactatgctgtgcacgttgctgccatgaggtatccacctgctgtgaggcgctgctacgcagcgtcagacgatagtagctgccgctatccgtggagaccagggactgggtgccgttcgatgcggcgatattcgcgctcaactgttcatacggcatgtcgttcaaggaatcgccggtctcgggaaccacgtagatgccgccgaatccaagcgcgctgatggccgcgatggcctcttcgtcgggattggacagcagcgaggcacaggcctgggccagttgttcgtcaaccgcatcatgcttgccggacagcaggcgcgcccgctggaccggagagctgtcgatcaaatcgccgcgcgaggtgcgcatcaccgcatagttgacaatgttgcgggtctccgcgctcacggcaagcacacgatgatcggcaccggcctccagataatcggtggtgaccatgggcaggccgttttcagacacgcccagtcccgcatccttatgacgttcgatgccatacatgcattggatgccaatgcagcacaccagtatcagagcaagcaccacacggccagacacgatgagcacatgcagacggtcctttttcgatgcgggatcactgccagacgcatgcaacggttggaatcgcttcaccgccccaccagcgacgagacacacgcaggcgaggaagcccaatatcatcatcgcgatgcccggctgcgcggaaccggccacgacaccatcggcatccacggttatggccacacggctggagaccagggcgagcgcgcctccgcagacgattaccacccacatcagtcgcgaggtccgcaacgcgaacggcagcaccagcgaagcaagagcaagcagcgtgatgacgccaaacagcacagtgaccgccaaatcggcataatcagtcgaccccattcgccatcccagcgcacgctgtgcggcctcaagcagactcagcgacgccggcgacccgttggcggatgacgttggcaccgtgatgtcgccgaacagttgacgccacatgcccaaatcggcgtaacgcaccgcattgacgagcgtaggagccaccgcaaaggcggcaggaaccggaattagcaacagcatggcgcgcttgcgacgcacgaatagcaggaacatcaggaacacgacgatcagcgcgaacagcagctgcggttcagcggccaccacagggatgaagcacagtgcggcgatggccgcggcctgaacggatgtgcgcggcttgagcgggtcttcggtatggtacatgcccacggcacggaacacgaatgcgaacgcggccggcaggaacaccattacggtaagcatcggcatattggcctgcgcataccagccgaacataatgccggtggatgcccacagcagtcctcccagcacacgaaccacgtccgagcgggtgaatacgcccgccagcgcccagaacgacaatgcgctcagcggcgcggccacaaacagtatcatcgccaaagcggcggtcacatggccgagcgtgaccaacgaggccagcatcagcaccagcagccacggcgtgggcggcgcaggaatgccggtgccgctgccaaacacccacggcgtggtggcggactgcaccagttgcgtgaagctggcaccggtgggaagcaacacatcggaatacaacgatccgccggagaatatcgaacggaacaccggccaatacatcaccgcgatggccgcaaagcacaccagcgccatcaccacggccgcactccagcgatatatggtgcgtgtccgcagatgggcacgttccagcggactgagcagcactctgccctgctgggattggaatgcatcccgacgatcatggaactgcttgatctgctggctgtctgcgaacaagacatgcagggacgatgcggcgaccttcgattgtctggccaccagactgcgtgatttcatgtttcccgcgatatcggccaaggccagccatggcaggcacaattgcacccatgcttcatacggcttcttgccgaacatcatggatatggccatgccaaaactgcggagcagcctccacagccagacgataaaccaggacgacatggccaggtccgtgtacagataccgctgttgggagcgatgcaccgtcatcgcatgattgaccgtgtgatcgtccttaagcggttccccgcctcgcgtacgaatgccctcataccgtgcgcgacgatgtgatatctccgcttgcgggacaaccaccacgcgtccgccgctcaggcagacacggcggcagaaatcaaccgattcgctgtaggtggtcagccaggcattgatgccccgcagtcgcgtgaattgcgacatggacaccagcgcgcctgccagcgacaccgcaaacacatcctgccgcccgtcatactgctcctgatcgggttctccatcgaccaccagggaatgcacggcgtggtgacccgcatacataccgacatcatgcagatgggagccttcccaatcgcactgtttgcacccgagcacactggcgcccggcgtattgcgccacgcctcaagcaatcgttcaaggcatgagtcatccgaagggcgggaatcatcatggagcagccacaatgcgcggggagcgtcatccagatcggcacgatccaatgcccggctgaccgcatcgccgaaggagcgtgcgcccttggccgagacgatgtgaatggtcacatgcttggactgcggcacctccatcaccggccccgatggcgaggggatgacctcgaacgaggtggttatcctcgaactggtgcgcccggtcgcgtcggcgatgatgacgacccccggaagaacattctgcgtcaataccgaacgcaatgtagaccggaggaaacgcatatcctcctcaacggtgatcacagccgtaatgccggtatccacatcctgcctatgcgtatatggtcgagaagacatggcgtcggccaacgcctcatgaatatcgctattacctgtcggactcataaactcccagtgtacgcaccagacttgaagggggtgtgtggagctacgcccgctcccggtgctctcgcttatatcgacggcgttcgcgctcgctcatgccaccccaaataccgaatcgctcatcatggtcgatggcccatttcaggcattgctcacgcacttcgcattttgcgcacacacgtttggcatcacgggtcgagccccccttttccgggaagaacgcctccggatcggtttgcgcgcacaacgccttgtgctgccaagatacatcgccatcaggtcggaatagtccccacaattcgtgccatggctcttcggctgaatcgtcgaccacaccccacatgcgattctccttgcctattgagcttttcatacggactaaattacacacatgcaatttcggttttgtcaaattctttctcgtgtcattacatcatttttatggaactgtgtgctatggcgtgaacgcgatgccctgacgccgttgcacatgatattgtgccgttcctgcgcaggaacaccatagcgcaggaacacccggcggatgctgtgtcaaagtgtcattcagacaatcgacagtttcaggaggggttatgacgcaggaatcaggtggggcggatccgcatatcaacccgccaagcttcattcctgcgggaaatcgacgcacccggccttccgggcaggtgccacgctccttcgcccccgcccgaacctcgcgccagtcaggtcaagctccatcggcccgtccgtccgtcacgggaaatgacatcgaagagcctcaactgaacgccaacgccacggcaagcgccaacgtctcggacaacggcaggcggactccgcccagtttttctccgaaaaccggacgcgccactcgcagcacggctccggatgccgccgcaccgcgcagcattccgccgtcgcgagcgcggatgtcttccggctcatcccgcaacgccgtgcgcaatccgtcggatatgccggtttcccggccctcatcgccagcagcaaacgtgtccacgaagttcagccatcttggccggccggcggcggcaacggcgaaaacggtaacggcacgccgtccgcgagccttacgcatcaccctatgcgcaatcgcggtactggtggcggcgttgattctttccgttttcggtgcctggcaatgggtggacagcaaactgaatcggagcgactggctgaccgacacccccaacacgccggcctcgacttggctgattcttggctccgatgagcgtgacggttccaccgattacggcggcgtagacaatatctctggcttcaggaccgatacgattctggtgctgatcaagcccaaaagcgggccgagttcgttggtttccattccccgcgattcgctcatgaacgtcgataaccagtacatgaaaatcaatgcggtggcgctgattgcgggcaagaaggctttggtaagcaacgtcgagcagatcaccggccagaaaatcgatcatgtggcacagatcaagttcggcggtctgcagaacgtggtgaacgccttgggcggtatcgaactgtgctatgacgaggatgttcaggattcctattccggactgaactggaaggcgggatgccatacggcggatggttccaccgcattgtccttctctcgtatgcgatatgccgacgcgcgaggagacttcggacgcaacgaacgccagcgacaggtcatctcggccatcgtcaagaaggcttccagcagtgagaccctgaccaatccgtccaaaatcgtggcagtgtccaatgccgcgatgagcgcactcaccgtggacgagaagaccaacccttacacgttgctcaccatggcgttggcgttcaaaagcgccaccggctcgaatggcatctccggcagcgtgtactggtccgaccccgattattacgttgatggcgttggttcctcggtgctgcttgacgacgccaagaacaccgaactgttcaatcaacttgccgacggcacgtataaggccggcaccgtgggcaatctggcggaaggctgaccgacgctttcccggagcccatcggcttcatcatcggcgcatgatcgtcaccgttgcctacaccgccaatcatgcacgggcaaaatgtcatgtggataactcggcaagctagaaccacataccttgattcggcttgcgctttcggcatgcgttcccccacgctggaagcatgacatcacagcagaacgattcgaagcgacattccgtccatacggcatccgccgtatcccgggcgaagcaccgtttgggcgcgccgccattgcgcgcccgcctgaccatgtttgccgcggcatgcccgatgatcgcgcaggcattgatgatggtcatactgctgttgcacgggcaatggctgttcgccgccatgatcgcaccgggcatattcgcctgtctcgtgtccctgctgctgacgctcccctcgcctccaggcccggagaaggctcccgatccgcaacaggcaacgatcgatgtcgatatcacgggcgacgccgatgaccgcgccgcagacctccgtcatgcgccgtcgcagccgatagaatcgctgctgcacttcgcacgcctgccatggcgcgccattgtgggccgctggcttgaaccccttgaccttgcggtgccgatcggcatgaccggaagcgagccgctgatgctcgatctgaaccgtcaggggccgcatgctctggtggccggcaccactggttccggaaaatccgtgttgctgcaaagctggtgtctggcgctcgcctcgatgaacgggcctgagcatctgaatttcgtgttcttggatttcaaaggcggttccgcgttccgcaaactcgaacggttgccgcataccgtgggcagcgtatgcgatctggatctggcgcatgccgtacgcgcgttgcgtgcgctggaagccgaactgacacgccgtgaacagctgtccgccgctgtccatgcttccgatatccgcgatatggtcaatccaccaccgcgcctgatcgtggtcattgacgaattccatgccctgaaggaccagctcccggattatgtgaatcgtctggtgcgtattgcctcgctcggcaggtcactgggcatgtatctgatcgcctgtacgcagaatcccatgggtcaggtcagtgccgatatgaaggcgaatatgtccgtcagcatttgtttacgggttcgggaccgtctgcaatcatgcgagctgcttggcgatggtcgtgccgccgacctcagtccggcaatgcccggtgcggcgttctgcaacgattccgaacaggtgacggcattccgctgtgcaacggcacgcgatatcgatgcggtgtgccgccagatcgcgttcgcatcgcggttcgtcggaagcccgccgcaaccgtccctgtttaccgcgccactcccccggcacgtaaaagaccggactgtggccgaccacgcaccgcaacgcattcgatttggacttgccgacgatggcatcaacctgcgagaggcgacggtatccctcaccggtggcaatatcggtgtcatcggcccgcaggggcgcggcaaaaccacgttgctgaaaacattggctcgacacgccagcatggctgatggcttggcggtacgtgtcagttccccgcatcgtcgggtatggagctcgcaatggcttcatggcggccgctgcacgccgtatgccagctcggatgcaccaccgcctccgcatatcgtgtggttcgtcgacgacgccgatgagttgttcgacccattccgcaccgacgagcaggcgctgtctttcacacatgcgttggccgatgagtccgtcagcgtggtattcgccgtcagcacgattcgcccgatacgtataccggagcattgcaataccagaatcgtgttcccgtgcggggagagaacgtccgatcttatggccggagtccccgctcgcctattggatatgatgagtcatatcgatgccgacaacgcgggccgggccgtgctcatcgagggcacatcggcatgtctggtgcagtgcgcttcgtgaaaacttcggttttttctcggcaaaacctcttgaaaatcaccacggttcgtggttaccttggtactggacttaaggaacaacaccagccacggggcttttaagggaggcaagcaatgagcagcgcttttgattggcgagccaaggccgcatgtcgtgacaaggatccggaactcttcttcccggtgggcaacaccggtgcagcctatcagcagattgaggaggccaaggccgtgtgccgcacctgcaaagtgattgacgcatgcctgaagtgcgcactggacaccaatcaggattacggcgtgtggggcggcttgagcgaagatgagcgtcgtgcgctgaagcgccgcgccatgcgcgcccgccgttctcaggccatgcagatgcaaatctgatgttttgattatcgcttcgtcatactaggaaaccctcccgcttgggagggtttcctcatttcgggcttcgcatcactcgtcctgagcagccctgagcttcatatcaagcaccacgcgggtgccgccttcgcggcgcggctcccaatgcacggaaccaccgaaatcattggtcacaaaggtgttgatgatctgcgtgcccaaaccggaaccggaagaacgagccaatccaccctgttcttcggagccgagaccggaaccgtcatcctcgaccaccacattgaggttcgggccggagcggcccacggaaatcgtgatatggccatccttgcggccttcgaacccatgctccaccgaattggtgatgagctcggtcagcacgagggacagcggcgtggcatcctgagcgggcatcatgccgaacttgcccatgtagttgatatcgatgtgctggtctttcatcgtggctaggtccacggccatgcgcagcaggttggcgatcaccttgtcgaagtcgacgacctcgtcggcggtctggctcaatccctcatgcaccatggcaatggtctgcacgcggcgttgcgcctcctgcaattccttcttgacctcatccgacttggtcttacgagcctgaagcctcagcaatgcggagacggcctgcaggttgttcttgacacgatggtgaatctcggaaatcgtagcgtccttggtctgcagctcctgctcacgacggcgcagctcggtgacgtcacggcatagcagaatcgctccgatacggccgttgttgtcatacaagggcaacgagcgcatcgagacggcggaacggttggcgttgagttcggagtcgaccgcggctttgcctgtcaacaccaacggcagggtttccggaacagggtcgttctccttcaatagctgtgtgccgagttcgctgaggtaatggccaggcatggtggtcagcagaccgagacgcctaaagcagctgatggcgttcggggctgcgtatcgaaccacgccgtccatggtcaggatgatgaagccgtccgccacgcgagcgatatggcgttggctcatcaccgaatccttgtaggggaattggcctcgcggaatcatctcgtacagatgcttgccggcgttgatgctttccgactcatatcggccgttggattctcgtgtggccatattggtctcacgcacgaccaagcccaaggtcttgccattgtgccgaaccggcgcgtacacgttgcagacggtcgccttgcccacggttctcaataccgtggagcggaacaccacgctggagagcatggcggcgtccaattcgccgaccatgtcgtccggcatgacgtttcccaccacgtcttccgcccgcagcgtcataacggtggatggacggcattgctcggccaccacgtatttgccatcgccatcctgtaccagcagcagcagatcggcaaagctcaaatcggcgatcacctgccaatcggcgacaagatgatgcagccactcgcggtcctcgtcgtcgaagtcggggcgcgttgcaaggatatgtgaaaaatcagccatatccctatcatacgcagacgcaccgccgccgtcgcggcaagccacacgggcaagtacgacgactatgacgacatcgcatcttcaataccgcgccaatcgcgttgcacggcttcccgcccgtggccaaggtgccggcatgttgcttatcgtacacggcaagcatcacgtacagtttgatatccgaagccgccaccatattgccggcattgctgtgtccatggaacccatcatcgcgtttgcctgcgctttgacgttgtcatcgccattgtcctgggccgcaagatagaccggcagatagaaatcggcagccacgaattgcttgccggactgcgacgtggtcgcgatggtggcgtcctctgaggagtcggcggatgttccatcgatgaccatggcggagacggccacatcggaggacgagtatgaatccgcgatgtcagacaactggctggatgtgatcaccggagtggaaggcttcgacttctccgtcgagcttttcttggacgaatcgtcgctgttcttgtctttggcgctatcagacgtgttcttcttggccttggacttggcgtcagaagaatccgtcgtgccatcatcggcggaatccaacgcatcggccccggtcgactgtgccgatgtttgcgcctgcggctgagctccccacaatcccatgctatgggtgatgaacaagccgatgactaacgccacgacacaaatcagcgcgatgagcacaatcaccaccgctttggtgtgatcgacgccaggacgcccggcgggaggttcaggagaagcaggggccgccggattggcctcgggctgctccaatgggcttccgcactgcgaacagaaggcatttccttgctcgttggcaaacccacactccgtgcaatacaccatcgccgagccctttattgctgcgacgttctcatcttcggattccatagtatcgccgccattgggtgatagtgttcgcgcgagtcggtattgacaagcataaaagttacgctaacgtaggttacggcagcgtaagaagcgtaacgtcaactcgtgaaacgggggcatcaccatggcatcaacaaccggcgactcggaaaagacgatgcatcacgacgctcataacagcgcgacgattgcagaggatgccaccatcgcatccaagcgtcaggcggctatcgaggcgcgcgaacaggcgttgcaggccaaggctgatgccgtacgggccaaggcccagttcaaggccgaggccattcgagccaaagccgaggagaaggcccggcacaagctcgccaaagcggagaaccgtgcgctgaaaatcgagggcattgcccctgcggaagtggaacgcaagattcgtctcgacgtgcacggacggccaaagccgttgatgcgcggctggattcacgcgattgccgctcccctgtcattggcggcaggcatcgtgcttatatgcttggcacatggcgcgagtctgaagtgggcgtgtgccgtgttcatgacagcgtcgctgattctgttcaccaattcggcctgctaccatctgggcgattggagcccgcgcgtcaccgatgtgctgcggcgtatcgatcatgtcaacatcttcctgctcattgccggcacgtataccccggtttcgtttgcgctggaaccgttctggcgcaatgtgatcatcatatcgatgtgggcgtgcacggccatcgccatcgtgattcatgtgatctggatcaatgcaccacgctggctgtatacggtggtgtacatcatcttcggcatctacggcctggcttatatggtgatgttctggaattcgccgtatgcggggccagccgtggtggtgctgctgtgcgccggcggtgcctgctacatcctcggcgccatcgtctacgccttgcgcaagcccgacccttggcctcgcgtcttcggattccatgagattttccactgcggaacggtggccggatatgcctgccatatggtggccatctacatggtgatcgtctcgctgtggcaataagcgctacgacatataagtatgcccccgcctacgggggcataccagtcacttaactcaggccagcggcttggcggccttgacagtcacggacagctcgcggccgttcggtgcggtgtaggaaacgacgtcgcccaccttggcgccctcgatggccttgccaatcggggaatccggggtcatgatgtcgtagtcggtgccggccacgatgtcacggctgccgagcacgtaggtcatctcgttgccgttgagctcgatggtcaccacagagccctcgcccacggtgccttccggagcattctcgatgatcttggaatcgcgcagcttgacggtgagctcggtgatgcggccctcgttcttgctctgcgcctcacgggcggcctggtagccgccgttctcggacaagtcgccctcggcacgcgccacggcgatcttgtgcgcgatttcctcacgcagctcaccttcacgatgggcgagctcttccttcatcttgttgtatgcttcctgcgtcagcaggtagaccttgtcctcagccatatcgtcctcctgaaccgttgtcgatgctgaaacaatcttcgttatttatgacaaaacgccggctatgaccccggcgttcgtcatgtgctgacctatggtcagcgggtggaaatgatgtcgatgacgaacaccagcgtgtcctcgccgccgatgccggcctgcgggatgccgcgggaaccgtagccgtattccggcggaatggaaaccaccagacgcgaacccacgttatggcccggcacagtctggtcccagcccttgatgacctgtcccacgccgatgccgaaactggcgggctgatgacggtcgaagctggagtcgaatggggtgtccttaccccacaccacgccgtggtagttcacggtgacggtgtcgccgcgacgcacgatcgggccgtctccctcggtcagctccacaaccttgaggcccttcggggcttcgggcgtcgggaactcgataacgggcgtggtgccaaattcggcgttcacctgaggcatctgatctgtcattagtcctccttcaaagacacaatgcgccctaccttagcaccatcggcgaatcggcggtagtccttcatccctgtgcgatacgacacgctggccgtatacgtcaattccggtcatcatgctggtgaataccggacatgtcaatcagcattcgacgacattgacggcaagtccacccttggaggtctccttgtatttggccatcatgtcttcaccggtctgcttcatggtttcgatggcctgatcaagggtcacgatgtgtgagccgtcgccgagcatggccatacgcacggcgttgatggcggtgttggcggccatggcattgcgctcgatgcatggaatctgcaccaatccgcccaccggatcgcaagtcagacccaagttgtgttcgatgccgatctcagcagcattttccacctgttccggcgtgccgcctacgactgcggcaagtccggccgccgccatcgaacaggccgagccgacttcgccctggcaaccgacttccgcaccggaaattgaggcgttgcgtttgaacaggtatccgatggcaccggcggtcagcagaaacgtgaccacgccctgttcattggcgttgtccacgaaatgccagtaatagtgaagcacggcgggaatgatgccggcggaaccgttggtcggagcggttacgatgcgcccgcctccggcattctcctcagagacggccaaggcgaagagatccacccatgcggcgtcggaagactcgagcacggcgtctttgcgccggctgtcgcggcgcagcacatcggaattcgaggcgagacgccgatacattttcggcgcgcggcggggtacgtcaaggccaccgggcaatgtgggttccgccgaggtgcatccgtggtccacacaggcgcgcataacacgccagatggcatcaatatcggatcggacctggatgcccgagcgtgaagcggtttcgttggcccatacaagttcggcgatgctgagatgatgttcccggcataacgacaccagttcagtgcatgatgagaacgggtagggtgcctcgacgccgaaatcagtggatgatgactcgtccgcatcggcaaaggaggcgccttccggagggcgttcatgaatgccgatcatcgggtcttcgggagcgcctttgcgcacgaatccgccgccgatggaataccagacctgttcgtcgaccaagcttgcggcggcgtcgaacgcctggaatcgcatgccattggggtgcgcggccatgcgcttccattgttcgaacaccacgtcacggtcgtagtcgaaatggatgcgtttgaggccggcgaggttcagagtatcatccaacgcgcagatctcgcggatgtgcatcatgtggtcggtatccacggtggccggcagattgccttcgagcccagccatcgcagcacgatcggtgccgtggccgagaccggtcagcgccagagaaccataaagcgtgattttgacacgtgcggtgcgatcgaccaaatggtcggcctgcaacgaggaggcgaaagcatgtgccgcgaccatcgggcctacggtgtgcgaggatgaaggtccgacgccgatggtgaacatgtcaagcacactgaacatttggctccttctcccctgctggttcggcatgccggtgttaccaggcgtcataccatcacgatatcgtatcccagcccagcgcccggaatcgctttcgccttgtgcgatgatggccgcgcgcgtcatgccggcgagcgataagtcagtcagtgagacagtgcggagaacatcatgaccagtacgatgataccgatgatggccaatacgatctgcaccaccatcagcccgatggtcagtcccttcttggtggcgattttgggcgcgtacgcctgtgccaacaggaaggcgatgaagccgaacaccgcgtagttgacggtcagggccatcacatcgccgttcgacaacaccacgccgttcagcggctggttcagcgtgttcatcatcgcgctcatcacgaacatgccccacacgccgtagccgattaatccgacgacgccgtacagccatggcttgagtttgtcgttggcacgcagggtcagggcttcggcacaccacaacagggcgaagccgacgatgtaggtgaacgccacggcgatcagtatcacgatagtcgcccatggcaggagtgcggccacattgccgatcatggacagatagaatcccgagcaggcgatggcaccaacggtgagtgcagtgcccgcaatgacggcttgggcaagcatggtgggcagtgcgccttgttcgactcgttcgacatcggtccagcgtgaagccatgtggattcctcgtttcatcaggtacatcgtcacaacgccacatagcctaacggccttttgtttcggccttataagctctccacatagtgagctgcgagccccctctgacgaggggggctgtcggcgaagccgactggggagagaccacggcacagccgcaaaaacggcatcggccacaggccgatttcaaggtgcctccggtgggactcgaacccacaagccgaagcgatcgattttaagtcgactgcgtataccatttcgccacggaggccaacttttctattataagctatctcctgccctgagcattgcttgcgggttgctgcacttcgtgcagccgtcgcggcatagccgctcccctcgcctacaaacagcccaccgggctgtttgcttaacggctcagcccgctggaggcacttaccacttacgctattgagccagcaaccggcgaccataatcgagcacaatgccgtccagcagaccgtgttcgctggcaacgaacgaatcgatggcttcaccatgatcggccttggcggcttcgctgacacgcgccagcacacggctccagaccacagcgccgccgccgaccacatcgatacggccggggtggatggtcttgtattcgcggcgctcgacgcgcgtcatcctaaggaacttgtcgtccacggcataggcgtcttcaaggctcaaccgatgcccgtcgaccacggtgtgatcgtattccttcaatcccatggccaaggcggtcatcgtggtcaccgtgccggacacgccgatgatggtacgggccttgcctgcgtccacggtgcggaaggcctcatcgatatgttcatcgacgtccgcaacggcctcatcgatctgtgtctgggtcggcggatcattggtcagatgacgttcggtcatgcgcacggaaccgatgttcatggaaaacgcgccctgaacctgggtagtgggcgcactgacgccgtcgccaccgatgaccagctcggtggatccgccgccgagatcaaccaccagatagggggcgggcagatcgtcgcgattgaccacggaagtggcaccaaggaagctcaggtcggcttcttcggtaccgggaatgacttcggggcgcacgccgaggatacgttcgatctcatcctcgaactcctcacggttttccgcgtcacgagttgcagaggtggcaacgaaacgcaggccgtcgatgggatgttcggcaatcacaccggcgaattcccgagcggccacataggcgcgttccaacgcttcgtcggcaaaacgatgggtcttgtccacatcctggccgagacggatcacacgcaggatgcgcggcaccacctcatgcatgccatcggcatcgacacgtgcgattttcagtcgaatggagttcgtgccgcaatcaatgccggcgacggttacggattccttgctcattgccttctcctcgtatcccttagtgcgtatgaatggaccgttcgcggtggctcatctgttgatcaatcgtccagtgtgcaacggcagacggtcggttcgaactcgtccttaacacgttccagcaccaaatcgccaatggggttagcacccggtcccataaccagggattgggccagcagggcatgcaggcacttgacgcgcaccggcatgccgccggccgaagtgccttcaatatgctcctcactgtcgccaagacgtcctgccagttcgtggcggaatgccagatacaggttatgggcctgctcatatgcggccttgagctcctcgtccgaggccaacatgtcgttgtattgctgcatcacgccggcggcctcgacatgggaggcggccttgacggcttccggaccggtcagatagcacgtggtggggaaagggattccgccgggcaacaccggacgggtgattacggcaagtggcctaccgcagacgcatcgcgcccccacggcgaccatgccgcgcgggtatcggccgagctgacgctgcaccaggtcgatgtcatgatcgttggcgggctcggcaagcacggtatcgacaagggccttggccttggcggcgatatcgatggtcactgttgggttccctcccctgtgttctgttgggtattctgttgggtgttctgatcggattgggtgttctggtctgacttatcggaccgcttggatgagtcgttggatgacgagtcagaggaaccggaaatatcggatttgccggacacgctatcggtcacaggctcatcggcctttttgagcgagtaagacagttcgctgtaccatggcagaacttttttgttgctgctactggaatcttccgttttctgggattcgctatcggaaccggtcacggcttcgggatgaagcacacgcacggcctgttcgccggggaatacgaagccgaggcgttcacgggcctgggcggtgatgtaggccttgtcatcccaacgcttgatgtcgttttccaactcctgcttttgggcaatcagcgaagcctcctcacgcttgagaccattgagttcggccaggttcagggcataggtgtggaaggtggagaccagctggatggtgccaagggcgataatgaacagggagacgaagaacgctataggccccgccgacccttttttcctaacttgtgctttgccggttttgccaggtttgccggtacgggacgacttgctcatgtcacacgaaaatacccgccgcattcgacttgacgaatacgacgggtatcgagcttcagtggaaactcacgcctttacgggcgtttcagctcacttggccaggtacttcttgcaggccttgaaggcgctgtagccggcgtactgagcggtggagccgagctcctcctcgatctcgagcaggcggttgtacttggcaacgcgctcgccacgggccggggcaccggtcttgatctggcgggtgttcttagcaacagccaggtcggagatggtggtgtccggggtctcgccggagcggtgggaaaccatggatgtgtagccgttggcggtggccagctcgatggcgtcgagggtctcggtgacggaaccgatctggttcagcttgaccagcagggagttggcggcgccgaggtcgatggccttctgcagacgagccgggttggtgaccagcaggtcgtcgccgacgaactgcagacgatcgccgaggcgagcggtgatggcagcccagtcttcccagccttcctcgttgaacgggtcctcgatggagacgatcgggtactcgttgatgaggttctcgtagtagtcgagcatgtaggcggagtcacgctcttcaccgtcgaagcggtacttgccggtctccttgttgtagaactcggaggaggcgacatccaggcagatgccgatctgcttgccaggctcgtagccggcggcggagatagcgtccatgatgtacttgagggagtcctcgttggacttcatcttcggggcgaagccgccctcgtcgccgaggccggtgttcaggccttccttcttcaggacgttcttcagggtgtggtagacctcaacgccagcgcgcagagcctcggagtaggtgtcgaagccgtacggggagatcatgtactcctgaatgtcggtggcgaagtcagcgtgagcgccaccgttcatgatgttcatgttcgggaccggcaggatgtggccgttggtaccgccgatgtagcggtacagcggcaggccggcggactcggcggaagcgtacagagcagccagggagacgcccaagatggcgttggcgcccagcttgcccttgttcggggtgccgtcgagctcgatcatcaggtcgtccagagcgcgctggtcagcagcgtccatgccgatgaccttcggagcgatgacctcgttcacggccttgaccgcgttaagaacacccttgccgccgtagacggacttgtcgccatcgcgacgctcccaagcctcagcctcaccggtggaggcgccggacggaaccaggcccaggccctgggcgccgtcttcggtgtccagaacgacctgaacggtcgggttgccacgggaatcgagaatctgacgcgcgtacacgctttcaattactgccacaactactccttaaaacggttgtgtatcttgaatgacattcttaagagtagtgcgatttgtggacgttgtgaacaacacgcccaaaatttagcgttagcgctcacaatgccagtgtgccgcctgattgcaaggcagtacggacgaaatcgctcagtcaacatccttgccattgaggtagccgatctcactgtcggacaatttcagttcgctggctttgaacgagtcctgaatctcctgcgggtttctggccgagggaatcgtgaacagatattggtattgcgcaagttcccacgcgagcgtgacgcgctggtaggagcagtcgtgaatcttggcgacttcgcggaaccggtcgaacagatgctcgttgaacgggtcaaggaatccaccgagcggcgaccagcagacaaaagccaaaccgagcttttcgcaggtttccaacgtgtgttcagggtcgcggtgaaccggggagaactggttctggacggccacgagacgatcgcccaaaatattgcgggcggtttcgatgtccgcgttgtcgattctggagataccaaccgctttggccacaccttcgtccacgagctgcttgagtgcgcccatctggtcttcgtacggcacctgcggatcattgcagtgcgagtagagcagatcgagcgtatcgacaccgaggcggcgggctgattccttggcattggcgatcatggtttcaggtcgggcgtcggcctgccagccgtagttgccgttgccgtcaagcgtgcgcagccagccggttttggtggctacgagcacctgatctttggggccatgccacgagtgcagagcatcgcggaccagatattcaccatagcccatatcctccggttcgccggtgccgggtgcgctgggcagataataggaccaagccgtgtccaaataacggactccggcatcgagcgcggcatggatggtctcgattgcctgatcacggttggaggggcgcccctcgatggcgagcgccatcgtgcccatgccgaggcggggaatctcatagccggcaagtgttgccgtggtcgcgctctggttcgtgcggctcgtagtcgtttcgctcatagcagtcacttaatcccgctcgctggacagccggaacgattccgtctggggtgaatcatcgtcacaaacgacggcatgaatatgaatatggctcaccggaggttgcccggtgagccatagctggctcgactgccgcctcgcaccccgtctacaaacggctctgccgtttgcttgacgacggggtccatgccaaatcatcaagtaactggttggtccagaggactacctggtcggagctcatgggaccttggcccagggagccggtgaacggggtggggacgatgagttggtgggtgaccgggcggtattgggtgcctttgtaaatacggcccatacgcatctggatggattcgggcgggtcgatgcgaccgatgcgcacgcggttggattgcgcgagaatctccgaaatgccgagcttgcgggccttgaacttcagacgggccacgtcgaacagggtctcgaattcgaccggcggcttgccgtaacggtcggtaagttcctcttccaaatccttcagatcggcctcgttgcgggcggaggcgagcttgcggtacgcttccagacgcagcttgtccgaatcaatgtactcgatcggaatcgacgcttcgatgggcaggtcgatggacacggccaccggctcgacgttctcttcgggctccttgtacttttccacggcttcggacaccatgcgtacgtacaggtcgaagcccacgccctcgatatggccggactgctcgtcgcccagaaggttaccggtgccgcgcaattccaagtccttcatggccacgtcgaaaccggagccgagcgccgtgttctgcgcgatggtggcgagccggtcatgggactgctcggtcatcggcttggacgggtcgtacaagaagtaggcgtacgcgcgctcgcgaccgcgaccgacgcggccacgcagctgatggagctggctcaagccgaaacggtcggcatggtcgacgatcagcgtgttcgcattggagatatcaagaccggtctcgatgattgtggtacacacgagcacgtcgatgccgcgatgccagaagtcgcggatgatctggtcgagctgcttctcccccatcttgccgtgggcgatgccgacgtgcgcctcgggcaccagcgtgtggatcttgtcggcgatggacgagatatcctgcacacgattgtggacatagaacacctggccgcctcgcagcagttcgcggcgtacggctgcggtgacctgcgcatcctcgtaggcgcccacataggtcagcaccggcaaccggtcttcgggcggggtggcaagcgtggacatctcgcgaatgccggtcacggccatctccagcgtacgcgggataggcgtggcagacagggacagcacgtccacgttggtgcgcagggctttcagcgtctccttgtgttccacgccgaaacgctgctcctcatcgatgatgacgagtcccagatccttgaacttgattttcgggttcagcagcttgtgcgtgccgatgaccacgtccaccgtgccggtttccagaccctcgatggtctcgttgatctctttggtggtctggaatcggctcatggccgccacattgaccgggaaaccctcgaatcgttcgcggaacgtctcgtaatgctgctggacaagcagcgtggtgggcacgagcacggccacctgcttgccgtcctgcacggccttgaaggcggcacgcagtgcgatttcggttttgccgaagcccacgtcgccgcagatgaggcggtccatcggcacgggcttctccatgtcggatttgacctcgtcgatggtggtgagctggtcggcggtttcctgataggggaaggcgtcttccagttccttctgccatggggtgtccgggctgaacgcgaagcccctggcgcgctggcgggcggagtacagcttgatcaggtcgtcggcgatctcgtggacgtgcttgcgggccttggccttggtggccgcccagtcggagccgccgagcttgttgagcttgggggcttcggcaccgatgtatttgctgacctggtcgagctggtcggtggggatgaacagtttgtccgccggggcgccgcgcttggaaggcgcatattcgatgaccaggtattcgcgagtggttttgttggcgccggtgccgatggtgcgctgacgcatttcgatgaaccggccaatgccgtgctgctcgtgcaccacgtaatcgccttttttgagctccaccaagtcgatggccttgcgccggcgtttcggcgctttggccacggccacggccgaagtgcggccggtcaggtcgcgttcggtgagcagggcgattttggcggctttgtccacgaagccgtcgatggcctgagagcggatgacgtcgaaattggcgatgccggtagtgttgatcgcgcgcctgagcctagccaaggtgccggccgcagcggcggtgatggtgacgtggaagccggcatcgagcaggccttcgatgccttgggaggccttggcctcatcccctcggaattcggccgggttctgggcgtcgagctgcacatggccggtcaacgtggtgtccacgccgaaactggtgaggcgaatcaccggatgttcggagtattcgagggagctgatggtttccgcatagtcgaggaagctggcttcgtcgaagctgatgggcgcgccggcgccgtggccggaagcggccacatgccagctggcggccaggaactcgttcgcggtttttgccaagtcttcggcggagcggcgtagtttctccgggtcgctcaggaggatcacggcgtgcttgggaagcatggagcccaccggttccagatggtccacgagtgcgggcatcagggattccatgccttcgaccggaatggcgttggcgatggattcgagcatgtcctcagcattgggaatcgaaccgaccaaggctttggcgcgggtgcgcacggcgtcggtcagctgcagttcacggcatgcggtggcccaaatggtcttgaggccgtcgccgtaggtacgctggtcggaggcgtggaattccttgatggtgtcaatttcgtcgccgaagaattcgatacgcaccgggtgcggtgcggtgggcgggaatacgtcaagaatgcctccgcgcaccgcgaactcgccacggtccatgaccaggtccacgcgcgtataggcgttttcgatcagacgtttggcggcttcgtcgaggggcaggtcctcccccacggtgaacacgagcggctcgacatcgcccagtccttggacgactggctggatgagcgagcggatcggcatgacgagaatgcgaatcgggccgaacatcgaatcggtatcgctcggatgcttgagtctgcggaacacggccatgcggctggccacggtgtccgcgcgcgggctcagacgctcgtgcggcagggtttcccaggcttcgagctgggcgatgtcgttcgggtcgccatcataccaggagcgcagcgagcccacggtctcttcggcttcgcggccggaggccacgaccagcacgaccggcttgccgggtttgccggccacaccctgcccgatggcggcggccaaagccgggcgcaaaccttcggggatgccggccaggacggagttgtcgacgtcgtccgaagcctcgatgtcgccggcggcgagcttcaggaaggtcttgtcctgttccagctcagacaggatgcctaccagtgagccgttgatcaggtccgggtgcgtcgcctcaccggccattgaacttctcctgggtcttggcaagaccgtggaagatgatgtcctcggcggcgtcggcgccgtcagccaggaattcgggcagctgcttgcgctggtccggaccgaatccgcccagcacccagttcaccgtgttgtcatgcgcgttcgcaccgcgcttggagtgaccgacgcccatgcgcacacgcgcgtatttcggcgtgccgagggaacggtcaatcgacttgatgccgttgtggccgcctgcggagccgcctgccttgaccttgatacggccgaattccaagtccatgtcatcgtgaatcaccacaatatggtcgggctcgatctggtaataggcgctaatggaagccaccgcattgccggaatcattcatataagtcagcggcttggccagaaagaacttgacggtgcggccgtccaggttcatcacgcttttaccgagcatggccaagcccttgtgatcggcgaagttcaccgtccaacgttcggcgagcacgtcggcggtcatgaagcccatgttgtgccgcgtgtcctcatattttttgccggggttgcccagtcccgcaatcagccagaaatccgatgccataatccgctcctcgtccgtcttcctttattcccgtatgcacgttctgtacgttccgtacgtcatgcgcgcgttcgcctcgcgcactggcccatgcccggccggatccaaccgtcaagattgtactcaacgccgccgtcaagccttggaatcggcaagcagcagggcacggcattgctcggcatccatcgatcggaccgatgaatggtgaaacgcttcgacgtcacgagtcacgatgacgtcggcgtcattgtcctcggcaacggcacggatgagcccgtcctcgaagtcgggctcatcggaccggtacgacatacacgcatggcgttccataagtggacggatgtcgaacaattccatcagtccaccgatatcgtctcgcgccgcccgctcctcgccataatgcttgcgcaacacgcaatacacgtcattcaatgacgataccggcgccatgatctcaatgtttggctgtgcaacggcttccatgagcaaatcaacacattgtttatggaaaggcgctcgtttgtcattgcacaaatcgagcagaatattcgtgtcaaacagcagtttcatcccgtcccccaaatcgttccatacgtgcctgcgcgagaatctcctcatccgaaagatcgccttccgcctccggcaaattccggtcggcgaaacgttgaatcaactcctgctttttcctacgctcccgctcctgaatcagggagagcgtcagacgctcgaattccggcagttcccccgtatccgcaaggtagtcggtcagatcacgaatcaggtccgaataggtgcgcccattacgcttaagcactttctccgcgtcacgcttccgttcggcattgacgcgcgccgtcaccatggccatagtcatatcgcacctccttgtaataccagtattacaagagatggggacgagtgaatcgcgtctattaggcggtgacgccagcgaccttttcgcgctgtttgccgttgaggcaccagtaggccagcgccacgaacagggccgccgaggatattgccgagcgtggctgcggacaggttatagaggatgcccgacacgtcgagcgccgcgacgcccgccgcgtcggcgccgaaaccaaacgttttggcgaccaggcccatcggcaggaagaacatgttggccacgcagtgttcgaagcccatcgccacgaatccggcgatcggcagcaggatgcccagcaccttgtcggatacggagcgcgcggcgaatccgatgcgcacggccaggcagacgagcacgttgcacaggatgccgcacacgaacagcgtgtcccagcttggcgtcactttaacatcaactccggttggaaaaaatcccagtatgtagcattcggttctcaaataggagaaacatgcagcggcaatcaacaacttgtcgtttacgacgccaagcaagggaaacagctcagacagatgacgcttccctgcaatcggatgacatattgcgggacggcagcggattttgggcgttcttggcgtggcatcccgcaagcgttatcgcacgttatctgcaccgaatcataagaatggcagaattccaatgatttcgcaggaagagttgcgggacgcgagctatgtgcatcgtttgacgtgtgtggcatcccacgtgattgcgggatgccacgtcaaaacggacgaaaatcgcgtgccgtcccgcagtttgccgttatctgggataagcgcgtccgatatatggcgttcgaggaaaagagctgatccgatacaactttttagtgttataggacaccggaatccatggagagcaagggtaaaccgcctcgggcctacaggtccaaataccagtaggacatgtcccgcatggtgccggtggagtcggtggcagcggcgggcatgaggccgaattgggtgaagccgaagcggcgcatgagggcaatggagccgacgttatcggcgaaaatgatgccacaggccttgcgcatgtggcgggcccgcgcctcggtgagcagcctgtcaagcatgaacgtgcccactcccctgccttgccatgccggatcgatgtaataggccaaatcggtgacgccgtcatacccggcacgatcgtagaacacggagagcgcaccgaagccgatgattgaaccgtcttccgattccacaacaaaaacgccgtagggcggcgtatgggattcgacccaggcgcggcgttggtcgagggtgcgcggggtgaggtcggcggtggccccacccgccaccaccgcagcgttgtagatgtcggtgatggcttggatgtcggattcgacggccggatggaaggtgtatggcatgaagttcctttgaatacgcaaatagcccgtccttatgataaggacgggctatgtcagttgaggtaaccgactcccttcagtcgccttcggcgatagctcccctcaccctgagggaagccaagttacttgtcgagctcgatggccttgttgagggcgtcttcaagctcctgctgcgccttgccgtaggcggtccagtcgccgttcttcatggcggactggctgtccttcatggcttgggcggcatcgttcaacgcctgctggagttcggggctgcggtcggaagacgagccggaatccgactttccgtccgtggtgccggactgaccaccattggtatcggaaccagattggtcaccggacacgttctcggcatcgcccgcggccgcgccggaatcaccaccgaacacctgatccaaggcctcatccaacgtatccgcaaatcctacctgatcaccgaacgcgaccagcgtcttcttgagcagcgggaatgaagtcgcacccgaagacttgacgtacacgggctgcacgtacaccagtccgccaccgagcggcagggtgagcaggttgccgcgcaccacttgcgtgtcgccggattgcagcaggttcagttccttggacacgtcggcgttggcgttgaagttgttctgcgcctggccggggcccggtacgttcgaatccttgggcagctcctgcaatcggatggtgccgtagtttgagcctatcttgcccttctcattgccggcatccgagtcgaccgacaggaagccggtgaggatctcacgggtggactggccagccggaatgtaggtggagctcagcgagaacaccggttccttggtgccaccggtctgcaaggtcaggtagtacggcggctgcaggatgtcctggtcctgctgggactgggattcggtcgggtcgaccggcgtctgccagaagtcctcgccggagtagtactggttggcggaggtcacgtggtacttggagagcagctcgcgctgcaccttgaacaggctttccgggtagcgcatgtggctcatcaggtcgccggagatatcggagagctggtggtactggccggggaagatcttctcccatgccttgattaccgggtcggattgatcccatacgtacagatccacggaaccgtcgtaggcgtccacggtggccttgaccgagttgcggatgtagttggccttctgcgagcccaaggatgagaccgttgcggaagagacggtggtggaatccttggtggcggagccgaggtcggtcatctgcgagtatgggtaggcatcagaggtggtgtagccgtcgacgatccacttgacgcggccatcgaccacggccggatacacacggccgtcaagcgtcaggtacggcgccaccttggccacgcgctccttgggggaacgatcgtaaagaatctgcgattcgctggtcacacggtcggagaagagaatctgatcggagccgaagcggattgcgtagagaatacgggagaacaggttgccaaccgaggggccgccgtcgcccttgaacgtggtcagggcgccttccgaaccggtcgggtagtcgaactcccaagcctgcgtgccctccggtgcgccgacgatcgagtattcggtggtgttcggcgagaagtagatgcgaggctcatacttttcggattcagtgagcttgccctgagtggggatgccggattcgaagaattcaggctggccgtcggcggtcaccttgttaccgtaagcggccaccacgccgtaaccgtgggtgtacacggtgtggtcattgacccaattgcggttgtcgttgccggccaggtcaagctcgcgggcggcaatcacggtgtcttgggaaacgccgtcgatctcgtacttgtcgactgccaaagtgtcggcgaaggtgtagtactgcttggactgctgcagctgtttgaatgtggggctgacgacctgcgggtcgagcagacgaatctgcgcggtggtgtcgccctccttggccagagcgccctgctcgcccttgtcggttaccttgtattgctcggtcttgagcttgtcaagaccgtaggcggcgcgggtggcgtcgatattgcgctgaatgtaggtggattccatctcctgtgcgttcgggttgacgcggaagcgctgcaacagcaccggccatgccacggtgagcacaagacccaccacgaccacgacggcaatggaggtcaccggcacacgccaggccttgagcgcggcggaggcgcgcacgccgatggacgcctggccttcgagcgtgtgggaacgcatgagccagatgcccagcaccacgccgaggatggcggtcagcgcggccatgatgaaggtgacggggatgttggcatgcacggcggtgtaggaggcaccggtgatgcgtgaaccctgcacggtgagctggtcgaagacgccgatcatctggcgcactgcccaagcgaacatgttgagcatcagccagatgccaagctggcgacggcaacgcttggtgatggagaacaggccgcgtccgttaaccggcatagtaatgcggataccacccatcagcacatgagtgaccacggaaaacacaaggcccacgcccagcagcatggccacggcggcgagcacgagcttcaggcccggcagcacgaacacgtagaagccgttgtccagaccgaactgcggatcggtggtgccgaacgactgcgcgttgaacatgagcagaatctcgctccagttcgcgttgaactgagagccgaagatgacgccgacgatcagcgaaatcaccacggccacgcggcgagcggttttcgagctgacggatttgccgacctcgaccacatcgccgttaatgcgaatggtggaaccgtcggccgaatcagggcgtgctcgaatggccagccaggcggaaacgaagccggtcaaggccatgagcagcgcgtaggccacccacagaccgattttcaccccgagctgggtccagaccacggactggaagccgagctggccgtaccacatcagatcggtgatgaatcgggacaggccgaagaacagaccgacgatgatggccaaggccagcaccacgccgatcagaatcttgctgccacggctgcctcctgagccaccggacgctggcttacgggtgatacgcggattggccgggccacgtggagggcgggatgacccggaggggccggcgttggtgttgcgggccggaccgtccccatcggcctcgacatcgaggatgatcggatcgtcattgttcgcattgttgcgtcgtgaatcgccgccattgccgaacagtattgagaaaggatcgttaaaagacataactcaagcctatcgaaagggcgggaggtaggttatgccctgagcacagaatgaggcagcgttctgttctacgctccgttctacgcttgccggtatgaacagccaacggccacaacatatgcgtccctcagcacacgccacacgccaacttcggcacaggagcactccaatcgtggcgacaatatgtgctttggcagtggtgttggccggcgtggcagcctacggatggcatgtcggatggttcaccaaatccacatcaaacggcaacaccaccactccccagacctcccagacaagtgcgttaccacgcgccgacgttccttccccgaagaagaacgaaccggccgcacaagcccaacgtgcggtatccgccatgacacttgaggaacgtgtgggacagttagtgatggtgccgttgcttgccggttccgatccctcctcgttggcttcaacaatcaccgatgagcacattggctcggccattctcattggcaattggaataccggcgccgatacggtcaagaccgcgaccgcgcaactccaaggatatgcgccggccggcaatcgtctcatcatcgccaccgatcaggagggtggtcaggtgcagcatctgactggtaccggtttcgacacaatgcccagtgccgttgagcagggcacaatgtccgctgacgcattgcgtcaatcggcaggcacgtggggttcgcaattagctgctgctggcataaatgtcgatttggcaccggtgctcggcacggtggtgggcgatcgtgcctcaaatgctccgattggcgcgctggatcgtgatttcggattggatgcggccggcaacgccgaacatggcatcgccgttattgaaggtttgcgagacgctcaggtcggcgcggcggtcaaacattatcctgggttgggcgcggtaagcggcaataccgacttcaccaccgaaggcattctggatacgaccaccacgttgggcggggccgaggcaggtgcctttgaccaggcgatcaccaagaccgatcctgcgatggtgatgatgtcgttggccacgtatcaatccatcgacccgaataatccggcggtgttttcttctacgattatcgacggtcatattcgcaacgccctgaagtacacgggcgtggtgatttcggattcgatgtctgccgaagcgttaagcagctacgatgtaagccaattgggagtaaagcttgtcgaggcgggcggcgacatgtcctgcatcggtcagacggattacgtaaagccaattgtggacggcctcaacgaacgggcgaagtccgatccggctttcgcttcgaaagtgacggcggcggcgactcgcgtaatggcattgaaaatcaagatgggactggcctgactgcttatcctttgcactggtgaggattgatgcgcactgattcgcgctaatcctcaccagccctcgtacaaatgcacactagtcctcgtacgaatcgtcagtcctcgtatgaatacagaccatgcttgccgatgtattgcaccacgccgtcaggcaccagataccagaccggctcgtcgtgttcggcgcggcggcgtacatcggtcgaagagatggccaaggccgggatctcaagcgtatcgacctttccttcgggcaaggtcacgccgtccggactggagtagccggggcgcgtgacggccacgaagtgggcgaggtcccacatgaggtcggcgtccttccactgcataatttcggccacggcgtctgcgccggtgatgaagaacagctcggcgtcgggatgttgggcgcggatatcgcgcagggtgtcgatggtgtaggtgacgcccggacggtcgatgtcgacacgcgagacggtgaatttggggttggatgcggtggcgatcacagtcatcagataccgatcttcggcgttggtgacgtgcttgtccagcttgaacacaggtcggccggtgggtacgaaaatcacctcatcgaggtcgtatacccaagctacttcggaggcggcgaccaagtggccgttgtgaatcgggtcgaacgtgccgcccatgatgccgacgcgcaggcgcgtatgccagttgccgcgtgcggaaagcctgcctttgccatggctgctggccccggccggcgcggacaggtcagacatgcgccgttcggtttcgccttgggtgacggcaacgatttcggcgggctcggcggattccactgatttttcggactgaactgacgcagccgttttgtggctgtcggtaacaccactcatgcctggtcgccctcgccggcggcgtcatcggctgattcggtttcctcttcgatttcgccggcggtgggattgtcttccctgggatcgatcttgcccatgtcttcatcccattcgtcctggaccacgcgacgaatttcggcgaaggtgggcagcgggaagtccggctggtagaggcggcggacctcggccacacgctcggtgatgcggatgagcgtgtcggtcatgccgtcaaggtcaccgtcgtgctccatctggctgtatttgccgatgtagccttccatgagctccatgtgttcgcgcacgatcttgagctgggcatcgtcgaggtccgcgacttcgggcgaatcggtctcgggccaaccgatgagcacggcgtccgcgtattcgagcgacgcacgctgggcggcggaggcgatgccgtcctcgatctgcacaaggaacacgtagcggacgatgctgagccgttcggccgcgatcttcaggccgagcttgggatcgttgaggtcgatgtcgggccgcagttcgcttgccttgtttgccgtgtcagccgtaatgttcatgttgccgtcctcgttcatgcgcgcacctgtcctgttccgtaaccgatccacttggtggtggtcatctcccgcaatcccatgggaccgcgtgcgtgcatcttctgcgtggagatgccaagctcggcaccaaagccgaacacgccgccgtcggtgaagcgggtggaggcgttgaccatgaccacggccgagtcgatgcgcttggtgaattcctcgatggccgcataatcctcggcgatgatggattcggtgtggcctgtggaatgcgtgttgatgtggtcgatggccgcgtccaggtccgacaccaccttgatgcccattttgagggccaggtattcggtgtcccaatcctcttcggcggcgtggttgaggtcaaggccctcgattgccgcgccggagatgatgccgtacgacgtggtgtcggtctgcagcacgacgttcgcctcggccagagcggcggcgatctgcggcaggaattcggcggcgacatccttatgaaccaatagcttttcggcggcgttgcacacgcccacgcgctgggttttggcgttgatgatgatcgggatggccttggcgagatcaccggacttgtcgatatagatatgcacgttgccggcaccggtttcgatgaccggcactttggagttgcgcacgacggcttggatcagacccgctcctcctcgcggcacgagcacgtcgatatggcctcgcgcctccatcatggcggtggcgccggcgcgcccgtactggtcgacggattgcaccagtgcggattcgaaaccgtgggcttcaagcaccggggcgatgacgcccaacgtggcggcgttagtgcgttcggcggcgtggccgcctcgcagcaacgcggcattgccggacttgaggcacaggctggccacgtccacagtgacgttcggccgggcctcgtagatcatgccgatgacgcccatcggcacgcgcgtctgggtaaggcgcagaccgttgggcaggttgtatccgcgcacgatctcgccgaccggatcgggcagggtggccacatggcgcacgccttgggcggcggcggccacgcgcggcacgtcgaacagcaggcggtcgagcttgcccgcatccatgccgttttccttggattcgagcatgtccagcgcgttggcggcttcgatgtccgcagcatgctcgtccaacgcgtccgcaatggcaagcaacagttcgtttttggcttcggtatttgcctgtgcaagacgctcctgtgcgcgtgcggcctgatcggcctggcggcacaccgcgtcgaacacctcaggactcaattcatcgctcataaaaaacaagagtaacccacaatgggccgcattgcccgtttcgacccatattgcaccgaagatagccggggatataagcgcggctccctctgatgagggagctgcgtacatccgcaaaaaatcagtgaatctggtccaggtcggggtagagcgggaagtcttcggcgagcttgtcgacgcgggccttcagcgcggtcacgtcggcggacgggccggcggcgagcgcggtgccgatgatgtcggacacctcctcgtattccttcggtccgaagccgcaggtggccagggcggacgtgccgattctcaggcccgaggccaccgaggccgggcgcgggtcgaagggcacggtgttgcggttgatggtgatgccgcaggcggcgagcagatcctcgccctgctggccgtccatctcgctgttgcgtaggtcgaccatcaccagatgcacatcggtgccgccggtcagcacgaagatgccgttggccttgacgtcgtcggccagtagtcgttcggcaaggatcttggcaccgtcgaacgtgcgctggcggatgatctccgggtcgatgcggaaggtctcggggttcacgccgtacgcctcggcgtggtagaaacggccggggtagccttcggcgtatttgttggtcagcacggagccctggcattgcagtaccgctcgcggcacgaagttctcagaggcgatcatctcaaggccactgcgctggcggcccagttcggagtccagcagttcggcgatctcaggatcggtttcgcagatcggcgcgttgaaagcatcggttgccttctgcgcaaggggtgaagcggtcatgggtgctctttggtataagcgacaattgattcgccgttgtcgccttaccgtatggcccgtttgcagccggcctgtttcatgatatggccggtccccgttcgatggcaatggtgattttcgccggtgcgaccggtcggttatgcgagacggacggcccttctgcccacggcccacgctaaactggtgtggattcatcatccctttcaggcagaaggattcatcgtgacaaccaccttccattccacccgtagcaccaacgattcgctgaccgccaagcaggcgattcgtaagggcatcgccgatgacggcggcctgttcgtttcggacgcgttgggcaagaccaaggtggacgtggcctccctgccgggcaagtcgtaccagcagatcgccgccgaggtgctgggcgcgctgctgccggacttcacggccgaggagctgggccagtgcatcgccgacgcctacggcgaacagtggtccgatgagcgcatcaccccactcaagcccctgggtgacgattacgtgctcgaactgttcaacggtccgacttccgcgttcaaggacgtggcgctgcagatcctgccgcgcttcatggcgcacaccacgccggccgatggcgacgcggacgagaagatcatgatcctcaccgccacctccggcgacaccggcaaggccgcgctggccggcttcgcggacgccccgggcaccgcgatcaccgtcttctacccggaaggcaaggtctcccaggtccaggaactgcagatgaccacgcaggccggctccaacgtgcaggtggccgccgtggaaggcaacttcgacgacgcccagtccgcggtcaagcgcatcttcggcgaccgtgccctggccgagcgtctcgccggcaattcgcacgtggtgctttcctccgccaactccatcaacgtgggccgtctggtgccgcaggtcgtctactacttctccgcttacgcccagctgctcgccgaccaggtgatcaacgtcggcgatgaggtcgagttcgtggtcccgaccggcaacttcggcgatatcctcgccggctactatgccaagctgctcggtctgccggtcaagcacctcgtggtggcttccgacaagaacaacgtgctgttcgacttcctgaccaccggtacctacaaccgccagcgcccgttcttccagaccatctccccctcgatggacatcctcatctcctccaacctggagcgcatgctgtactacttgtccgagggcgacacccgtctgatctccatgctgatgaacgacctcaacaagtggggcacgtacgagatcccggaagaactgctggccaagattcgtcagatcttcggcaccggttgggccgatgaggatcaggtacgcgagtccatcaaacactgctgggacgagcaccactacgtgatcgacccgcacaccgcctgcggctactacctgcttgagcagatgccgcgcgacccgctgaccccgcgcgtgctgctctccaccgccagcccctacaagttcccgcgcgtggtgaacgaggcattgggcttcgacgccaccggcaccgacttcgagtgcatggatgtgctggcccacgagaccggcaccaccgccccggccgccctgcgtggtcttgagaccgccgacgtgcggttcaaggacgtcgtggccatcgacggcatggaggactacgtggagaaggccgcccaggcgctgtgatagtccgctgacggcactaactgacaattcccaaccgatacatgctttaccagcatgtatcggttttttgttttctgatgtcacaagtcgaaggtccaggcatgttcaagcatgtccgagccttgtcacgcgcggctttcttgcggcttttcacctgcaacgagccaatggcgtgttgcttgttttttctaggaaggcgggaatcgccatgctgccggcgaacgggaaaatccatgtggtttgttaggttctgtttctgcaactgaatagtcccatgagggagtagacagcattgcggcgaagggctcggcccaaaccgcaatgtggcaagtcaacatcgtggccgtcggcagttccgttacggtctggctttgccttaaatgacgagactcatgtaccgcggagtatgcgatacatggtcgtcaacgattcgtttggctgcgtgccgccatgttgcgcggtacgcgagtgatattacgcgggtttcagtgcggtgtgtcaaccaaacgagaggaacatatgaccacggccaacgggcagacgcccgcaccattcatgcagaatgcgccagcagtcatcagcacgctgggcaccgatgcacatcaaggcctgaccagcgaacaggccgcgcacaacctgaaccagtacggccccaacgccttcaccaagccgaagccggaatcgatgctttcccgcatcgtcaagacggccgccgacccgatgctcatcatgcttatgatcgcggcggccatcaccctgggcgtcaacatcacccgcgccatggccggcggccacgccgacattctcgaatgcgtgggcatcttcttcgccatcgccctgtccgtgaccatcaccgtggtgatggagggtcgcagcgccaaggcattcgaagcgctgaacgacatcaatgacgacacgaccgtcaccgtggtgcgcgacggcgaggtcacgctggtgtcgcagcgagacatcaccatcggcgacgtactgcagatcagcaccggcgacaagctgccggccgatgcgcgcctcatcgaatcgaacgatctgaccgccgacgaatccgcgctcaccggcgaaagcgtgccgagtgccaaagccgccgacgccgtgttcaccgacccgaagaccccggtggccgaccgcacgaacatgctgtattccggctgcttcgtgaccgccggcaatggccgtgccgtggtcaccgccgtgggcgacgacaccgagttcggcaagatcgcccgcgaactgcgcgccgccaacaccggtatgacgccgctgcaggagaagctcgcgaagctcggcaaggtgatcgccgtggtgggctcgattgtggccgcactggtgttcgtgcttcaggtggcccggttcgtggcttccggcaccgcctcgttcgacacgatttccgaggcgttcatcacctccataacgctgatcgtggccgccgtgcccgaaggcctgccgaccatcgtggccgcgtgcctcgcggtgaacatcatcaaaatgtccaagcagaacgcgctggtcaagaagatggtggcgtgcgagaccatcggctgcatcaacgtgatctgctcggacaaaaccggcacgttgacccagaaccgcatgaccgtgatcgaggcgtacaacgcgccgggccgcgccttggagaagcccgagcagatcaggaaccgcatgctgctggagaacttctgcgtcaacggcaccgccgacgtgaccttcccgggcgccaccgaagccgaggccggcgcgatgccggaattcatcggcaaccccaccgaatgcgcactgttggtcgccgcgcacaaggccggactcgactaccggattcgccgcgagcgcgcgacggtgctccacacgtatccgttctcgtcggagaccaagagcatgaccactgtggtgcgtgacggcgacggcattaccgtgttcgccaaaggcagcccggagaagatgctcgacctgtgcgccgtcgacgccaagacgcgcggcgaaatcgaacgggagatcgcgaagttccaggcgcagtcctgccgagtgctcggcttcgcccaccgccatatttccgataaggacgccgacactgcggctctcgattacgctgccgaccgcgccggcttggaatccggcatgatgttcgacggcttcgtggccatcgtggatcccctgcgcgaggatgtgcccggtgccgtggagcgctgccgcaaggcgggcatcgagctcaagatgctcaccggcgacaacatcgtgaccgccacggccatcgccaacgaactcggcattctggacgagcggcatatcgccgtcgaggcgcgccagatcgaggaaatgagcgacgaggaactgtcccgcgaaatcggccgcatccgcgtgatcgcccgcagcacgccggttatcaagatgcgcgtggtgaacgctctgaaagcccagggcaatgtggtggcggtgaccggcgacggcatcaacgacgcgcccgccatcaagaacgcggacgtgggcatcgccatgggcatcgccggcaccgaggtgtccaaggaagccagcgatatcgtgatgctggacgattcctttgccaccattgtcaaggccgtgcactggggccgtggcatttacgagaatttccagcgattcatccagttccagctcaccgtgaacctgtcttcggtggtcgtggtactcgcctcgctgttcagtggtctggccgcgccgttcaccgcattgcagctgctgtgggtcaacatcatcatggatggcccgcccgcgctgacgctcgggatggagccgattcgcgacaatcttatggaccgcaggcccacccgccgcgacgccggcatcgtctcgcgcggcatgctggagcgcatcatcgtctccggcgcgttcatcgccgtggtgttcatggcgcaaagctggacgaacttcatgggcggcaccgccgaacagcagtcgaccattctgttcacgctgttcgtggtattccagctgttcaacgccttcaacagccgcgagctgggcaacgccagcctgttcgccaatctgctgcgcaataaagtgatgatcggcgtgttcgcgctgatgttcgcacttcaggtgctagtggtgcaattcggcggcgcgatgttccgcaccgtgccgctgccgatcgacatgtggctgaaaatcatcgcggtcggtttcggcgtggtggtgctgcaggaagttatcaagaccgtcaagcgcgcagccgccgccatccgcgcgcgccgcacggccaatgaaagcgattcccagcaaccgcaccagccaatcgctctggatctggtggactgataacacaccgataacggaaagagaccgacagattcctgtcggtctcttttcattcgcggtcggacaaatgcgcggctagagttctttggctcggtagatgcggatggctataagcatggagccaaaaaatgcgagcagacacaacacggcgagaacaagcgccgtatgccaccagatcgtcaggaaatcggtaatattcagcaaaagccattgccagtcaacaggcaatcgggccagcagcgcaatgacggcatacaagccaaccatgaccgcgacagaggccaccatcatcttgcggaaggtgaaccggtatgcacaggccagcagcaccgacccaagaatgatagccaaagcgaagatgaaagcacctgctgccaaggtaccgatccaccccatatctgctatatcgccaaagacaatgaagacgccgccgcatatcaccacgtccaaagcccagagcaggccaaccaccaacagaaaaaggtaccgacctacaacttgtgcagtgcgtgaaacaggaatcagccctcgcatggcactgtgccctgcagattcctcggatgacgcaggccccaatgcactcatacatgccatcgccgatgccaaacctccgagtccgcccatcagaccactaacaacgtgttcatcgacgtgggtcgatatcatcaccagcgataccacgatagacaacaccgggaaaaccagcagaaataccatattcgccacgctaaacagacccgtcccgacacaatcgaatcgacattgctttactacggatttccagctcatcgtcaccattcccttgaagcaaatatgcgagaggcaattacatacgagattccatatgccacaaccgtcgttgtcaataccgcaataaccagccacaatcgttgcgcgatgatggcattcgcggcatgggccaatcctctggtcaccgaagcaggcaaaatagatggcagtatgaatacagccaatacaacgacataaatcaccatcatcgtgactcgaagaccgcctagtttggtccacagataacccgtgggcacgataagcgcgaccatcagcgcggtgcagaaacctcccaacggcgccgcccacagattgcccgcgaatgaccaatccggattgaccagcacttgcaacccgtcaatcagaacaatcatcgctatcgacaatacggaaatcaccaatccaaccacatatcgcgcggccacctgactcttcctcgaagccggaataatgccacgaagtcgatatccgttctgtaagtcagcaaccgccatggttagcacccacatggcgcagatgaataccgtcatgatgacacccatgcgatagccgaagccatcaccataagcttcaccttgaaagatgacggagaacaacggtgccaacaacaacgagaacacagtccgttcgccgacgcacaggtaggccatatcgacgcgcaatgcagtggtcaatgcatgttgccgagaccgcgacaccctcagtattgcctccatggccgctcacctcccgctcaagtcacgattggaatcatgggcattggtcagtcgaatgatgtcatcaatggaagccgattcaacgacaagccccgaaaccaccgacgcaacagcatcaagcctgtctgaccggaccagcgcatcgaatccggtggcatacgtatgtgagcccagcactacgtccgcaggcagttgtgccagttcgtctggaccgcccttaatcaggcggaacgattcctcaaactcgtctttcggaccggtgtagtagagacggccatcggtgatgtaggtaatgaagtcagcagcacgttcgaggtcggcagtgatatgggtgctgaacagtaccgaatgctcgccatcctcaatgtaggcatgcaggatatccatgagttcgtcgcgggcaagcacatcgagtccgctggtcggctcgtcgagaatcagcagcttggcatcatgactcaatgcgatggccagcatcagcttcatctgcatgccgcgggaaagatccttgatatgtttcttgccgttctgtgcgtcaccaaggccaaaagtatccagatacttgcgatagcatccaccgtcccatgatggatacagtggcgcaacgatacgttcaatgttcttgacttgccacagttcatgcatgtagctgaagtcaaacaccacaccgagttgttctttgacgagctcctcgttggcgatgttgtcgaggccgagcacgtgaatcgacccggcgtcgcggtggatcatgttgaggatgagtttgatgagggtggatttgccggcgccgttcggaccgatcagtcccatgatgtagcccttgggcaggtcgaaggtcacgtcgtccagcgtgaagccggaatcatagtgtttggtgacgtcggtgacctgcaacgccatcgcgtcggattcggatatggcggtcatggccatggtcctttcttgaggttatttcttgcggtattcctcttcgagcatgcggtccaatgcgtccagcggaatgccggcggctttggcgccccggcttgcctcggccaggctttcgcgaatctgggtttcgagctgacgttgcatcagttcgttgcccttgtccatcacgaaagtgcctttgccttggatgttctgcaccacgccctcatcggccagttcgttgtacgccctggtgacggtgagcacggagatgcgcaactccttagcgagtttcctcaaggaaggcagggcctcgcccgccttcaactcgccgctgagcaccgccgaacggatttgggttttgatttgctcgtagatgggttcaccggacacggatgagatgatcagtttcatctatgcccctttcgattgtggttgactagcaccccagctgtttagctgttatacaacacagtataactgttctgcttaactgtcaaggtgtgttacataacagtcaaacagtgagcaaatacatcgtcaacttatagtgtcgaaacatgactcgtgcctacaatggcctcggaaaggggtacccatgcccaacaacgcccccgccgacagccccgccagcgggggcgtaacttttttatcacagcacgcgcggggcgtcatggaagtcgaagaggacaccgtcggccaggtggcagatttcgggccaatcggaggcggaggagtcgtcgtgcatggcccagaccttcatgccgaccgatttggccgacttcatgccgaccagcaggtcttcgaacaccgtgcagtcgaccggcgcggcgcctaggcgcttggcggcgagcaggtagacgtcgggctggtccttgccgacgtcgttcgcgtcatcgacggagacgatatcgttgaacagttcgaacatgccgacgtggcgtagcgccggctcacgcagatgcgggggcagcgaggtggcgacacccagtttgacaccggaggctttcagatcgcgcagatagtcaagcgcgccgggtttggcttcgaccgtggtggaataggcgacgctggccatgtcgtcccattcctgcatgagctcttcgggcgtgtctgtaaggccgaagcgtgcgatggtgtattcggcgatctggcggaattgcatggcggagactttggtcatgtagtcgggcggcacttcgattccgcgcttgttcaggaagtcgatgtcgacttggtcccagactcccatggagtctaggagggtgccatcgaggtcgaatatggcggctttggtcataggacactttccttcaacagttctcgggcgtggtctagtgaggcttcggattcgctgccggagagcatgcgggcgatttcgtggacgcgggtttcgccgttgacttcggcgatggtggtgaccacgcccaaatcgtcgtcatcggcatccggcggctccttggtgaccacgaactgcgcgtccgcccacgaggcgacctgcgccaagtgggtgacgacgatgacctgcgcgctgcgggccagccgtgccagacgtttgcccagttcgaccgcggccttgccacccacgccggcgtcaacctcgtcgaagatgaaggtttggtcggcaccgccgcgcgtgtcggcggccaccagctccaaggccaacatcagtcgactcagttcaccgcccgaagcgcttttgcccatcggcaactgcggcgacccctcgaacggtgtaaacaggaacgcgatatcgtcgcgaccatacggaccgagcggatcatcggccttgtctcgcggcgtgacacgcacttccaaggaggcgcccagcatggcgagcgagccgagttcttcagtgacgcgcgcgcccaagtcggcagcggcagccacgcgcgcggcgctcagcacgtcggcggcggcgagggccgcagcgtacagcgtctgccgttcggattcgagttcggcgaccttttccggcgaggcgtccagatcctccagatcgaacgccgccttgtcccgccaagcgagcacgtcggccaaggtggggccccaccgacgggtgaggtcgccaagctcgtggatacggccgttgatctggtccagatcctccacgctgccttcgtcgcccagctcctggctcagggcgaacaccacgtcgcccaaatcggcattgatggattcaagccgatcggcctgctcggcgaacgcgccgccgacgcgaatcgcgcgcaacgaggtcaccgcatgattgatgagttccacggccgaagcgccgtcggcggcgtccacatccacctgcgaggcatccagcgcgcccagcgccgaacccacgccttgggcgatgtcggccgcgttttcgatgcgttcgcggcgcgccttcagctcctcatcctcccccggctgcgggtcgattcggttgatgcggtcgatggattcgcgcaggtagtcggcctgttggcgggcagaggattcctgcgagcgcaggcgttccagccgctcatccatggcggccagcgcatcccacgccttgcggtaggcggccagttcggcttcgtctccggccacccggtccagaaactcgcgttgccgtgaggaggccgcgattttcagctgatcggtctggccatgaatggtaaccagttcgccggcgatggcccccagcaccgaacgcggtacggacttgccgccgagcacggcccgcgaacgtccggaagcgcgtacggtgcgggaaaggaacagttcgccgtcttcggggtcgacgcccgcgtcgtgggctttggccacggccgcggcagcaccggtgagcccgctgtcagaatcgtcagaaccggcatcgtcaccggcatcgttggtgtcgccggaatgttcagatgcgacggcatcatccgcgagcgcgaaaatcgcctgggcccaagcctcgtccgccccggccgagacgcgcgaggattcggcggccccaccggagaccagtcggatcgcggagagcagcatggatttgccggcgccggtctcaccggtgatggcggtcatgcctgcggccggcgcaatggtggcttctcgaatcggccccagattgcggatatcgagttcttcgagcatcaggctcctgccttgccgtcgcgttcgcccggcttgtcgggatcggtaccagcgacgccagcgtcaccggcaacggcaacggcaacgccagccgcatacgcggccgccgggaacgtatgcccgtgatgcagcgactggctcgaggcctcattgcgcgcgtgctcgcgccagccgaccacgggcagatcgaacttggagaccagacggttggtgaacggcacgccggagagtcgggcgaggcgcaaggtatcgcgcgattcgcgcaccatgacgcgcgtaccctgcggcagggcgcgctgacggcgtccatcgcagcaaatccagccttcggacatggaatcgtccagaatatcgatggtgaaggtcgagccggagccgatgatcagcggcctggcgaacagggcgtgcgcggccaacggaatcaactgcagggccttgacgttcggccacatgaccggaccgcccgcggagaaggcgtaggcggtggaaccggtgggcgtggagacgatgacgccgtccgcgccgaacgagttcatctccacatcgtccacgcggatggacagttcgaccatcttgccccggtcggcgcgttccagtgtgatgtcgttcagcgcccaatcctcaatgggcttggtggcgccgggcagccagacgtccacatgggcgatcatgcgttcgtcgatcgaatagtcgtgggtggagacccggcggatcgcctcgtcgatctggaagctttcgaattcggccaggaagccgacatgccccatgttcacgccgagaatcggcacttgggtgcagtggacgagttcggcggcgcgcagtatcgtgccgtcgccgcccaggaccacgacgatttcggtgtcatccgacacgcacggcggctgcacgccgaaatcgggggcctcggtgttgtcgatgatggcgacttcgaaaccggccactcgcagctggctcaccgcctcggccactacggttccggtctgcctgagcctggtatgcgtcaccaccaccgcgttgcgcttggccatggcatcctcctgtcgattcggtcgcactgctcattattctaaccgcagacaccgtcatcagtcgtacaggtgttcgaaaaatgctgcttcgtggcgcgtcgccggcaacgttccacagagtcgattatcgtaaggcttcggcatacaatggcgtacagccgcgcaatcaccgtacgcgtgccgtgcgcagcgcgatggcatgccgtatgaccgtacagcagtatcagttgaggagcttgaggacccatggccaatgacttcgacgaatcctccgccaatgaggaggcctcgaagggactgtcatggtggtattcagccgatgtactgagccgagacaaaagcgataaaaccgccaagcgcattcgacgtatcagcatcaccgaccgtctgctcaggcacccgggccgtctgtccatggtgtatttcggcgcactgatcatcatcgtcaccggtttgctgctgctgccgatctccacatcggacatcatcttcaccaatttcccgatcgcgttcttcaccgccgtctcggccctgtccacctgcggcattccggtggtgaacaccggcgaatactggtcgatgttcggccaggtcgtcgtcctgttctccatccagttcggcggtctgggagtcatgaccttcgcctcgatggtggctcttggcgtttcccgcagactcaaggtctcccagcgtatgctcaccgcgaacgagctgggcaccacgaagctttccgaggtcaaaggcgtgctcaccgtggtgctgggcacctccatcatcgccgaggtgctgaccttcgtgctgctgctgcccgacctgttccgcgtgaaccatggcaatatggggcgtaccttgtggcaggcgctgttctacgcggtgtcggcctataacaacaccggtttcacgccggatgccactggtctgcatgtgaaccgttggggcgtggggctgccgattctcatcagtgcattcatcggaacgctcggcttccccgtggtgctgaatctggtgcagtgcgcacgccggcggctcagcccgaaacgttggacattgcacaccaaactcactttggtgaccaccgctgtgctggtggccacctcactggcttggttcctgctggtcgagtggagcaataccggcctgttccccgcagatgaccccggcatgaagatgcgccgtgcgatgagcgccgccgtcatgccccgctccgccggtttcgatatttcctgggtgcccgaagtcacgaatgagaccaaggtgttcatgagcatactcatgttcatcggcgcaggttcctcatccaccgctggcggcatccgtgtcaccacgttcgcggtgattctcttgatttgccgcgccgcattcaccggccatcgcgatgtcaccgtgttccgccgccgtatcccccgccgtattcagatgaccgccgtgtccgtgaccacggcctgctttgcgttggttatggtcggtgcgatgatgctgatgttcaccaccggctgcgcgttcgtggacgccgtgttcgaagcctgctcggccttctcgttgggtggttattcggtgggcgtggcaagcgccggcaatccggccagcctgtttattctgtccgccgagatgattgtcggacgacttggcccgttgaccatcgcctactccatcagccgaccgatggctcccgaacctattcgttatccgcaggaaaacattatcgttggctgatcggccattcaatcggcgcccagcaatctgacatagagaggaccatcatcatggcagcaaaaccgagcggcaacaaaagcgtgctggtcatcggactgggccgtttcggcgggtccgtggccgccaccctcgaccagatgggtcaggatgtgctcgcagtggacaagaacccggagcttgtggcccgttggtccgcgcatctgcccaccattcaggccgatatgaccgatgtgctggccatcgagcagatcgacgcctcccagttcgacacggccgtcgtggccatcggcgacagcatcgaggcttcggtgatcatcaccggcaacctgctggacgccggcgtttccgacctgtgggccaagtccgtgtcccaggagcatgcgcgcattctgcagcgcatcggcgcccgccacatcatcaacgcggagaccgatgccggcaagcgcgtgggccatctggtggccggcaattatctggattacatcgaaatcgacgggccgtacaccgtcgtcaaggtccacacgcccctgtacgcggtaggccgcagcatcgaggacgtacaagtacatgacaagtacggcgtgaccgtggtgggcctcaaggccccaggcaaggagttccagtacggctccaaggaactggtcatgcatcgcaacgacgaactcatcctcatgggcaagcaggatcagatcgaccacttcatccaaggctaaccccctaactgcgctcgctataccccctatctgctcacatcgtgaccgatataaccccctcaacatggatgcgctcattattgtggcaataagccataaagctgtacgtccatattaataaggggagttttatcatcatgggcaagcatacgcagaattgcacgctgataggcaaaggagtctacggcaccataggagtggaccaacgttcccgtcttgccgatggcgcgcattttcacaccatgattgtgaccagcaccctcgaggcctcagttatagaaggggacaaactggtcatcaaaagtggcattgtgcggtgtgatggtgatattcgcgtatccagcatcagcggcagcggcgacatcgaagtcggcggcgacattatttgcgatgaaataacctttaccggcaaactacgatgcaacggcgatatcgtttgttccggaaatctgtccgtcaatggctccctaggcacccgtcatattagcggtcagacagtccgcttgaacggcgtgttgaagggtcatgacgtcaacagcagggctctggaagttcatccactccgcagtacgatgttttcccgttttgatatggatgggtatgaggatggcagcacggttcgccatatcacagccgtcacggttgaagccaaccatctgcaatgccggactttgacggcggactccgccatgctacgcaacggcagtgcggtggaaagcgccacgtgtgccaccgcactaggcatcgaccgtacctccagcgtgctgctggtgaacggagactgccaacgcattcatctcaagacagcgtaaagcaggtattcctcattaccgtgggtgccgatgatgggactatcggcagtggccaccacgtcaagtccgtgctgttcagcacaggcgaccacgtcgtgtaatgcccgctcccgcaatgccggatcttcaacgatgccgtttttgccgagtcctgcccggccgacctcgaactgcggtttgaccagtaacacaatctgcgcaccgggagccgcgatgcgcgcgattaccgggatcacataggtcagggaaataaaggagacgtcggaaacgatcatcgccggccggtaaggcaggtcgtcggcctctacttcgcgaatgttgacgccgctcatttcgatgacgtgctcgtcattggcgatgcgcgggtcgagctggccgtgcccaacgtcgagcgctacgactttggccgctcccccgcgcaacagtacgtcggtgaagccaccggtggaggcaccgatatccagacattccaagccttccggcccggtaaggccattgccggcaaaggtttcgaacgcgcccaagagtttgtaagcgcctcgggagacgtagtcgtcgcccttatccacggcgagttcgctgtgcccggctttgaccatgaacgatggcttggtgatggtctcgccgtccacgcgcacatgcccggccttgatgagtcgctgcgctttggcccgcgattcgaccagtcccgaagccacgagcatcatgtcaagtcggtcaagtggagtcgcgggatcgatatgctgctcggtcatatatcttcctttcggcccaccatccaccaacggggtggctcggcatggagccaccatccagcacttcacgtcatcttccgctggcgggagaatgaatcacctctgctagctgcggctgttatcaagctcgtgttgtaaggattccagcacgttgcgataggtctcaagcttgcggtcgttgtcttgttcatcgatatccgcaagttcggggtatcgctcggtgaccggcgcatgttcgctatccgtaggcataggactatgcctcgatggcgaacaccggtaccgtggcctcgctaagctgtgcgccttggtcggcggcttcccatgcggcgcatacggcggcgcgcaggccgtccatactggtggggtcgctgacgtgtacctggccgttttcaaaccaagcgctagccttgcggcattcccaagtaccgctctcatcgcggaccggctccggttgggcttcgccgagttcacgcagatcaggggcgatgaatgtgggcctcaggtgtgacggagccagcatcagttcggtcgggttggtgacaccggtcagcaccgccagcgaatcgtagtcgccgcggttaccggcctcgatatcggtgtcgaggcggtcgccaatggcgatggacgcctccttgggcaccaaatcgtggccttcggcggcgttcagttcgcgggcctcatcgtacatgtacgcttccggcttgccagcggaggcgaccggttcgacgccggtggccgtgatcacggcgcgaatcatcgatccgcaaccgggggcgatgcccagttcacgaggaatcgttaggtcgcggttggtcacgaaatacgtggctccggcctcgaccgcgaacgcagcatcggccatcatctgccaagtcatatccggataccagccctgaatgacggcctgcgggcggtcctgaggaccgtccacgatggtcaggccgttgcgggtgacctcatcgcgcaaatgctcggcgcccaatacctgtacgcgcgcgccggcgggcaacgccttggccaccatacgggcggccaccaccgaagaggtgatgacctgccacggctccacgtccaagccgaagcccttgagctggtcggccaccacgtgctggaagcgcgaggagttgttcgtggtgtattcgatggtcatgccggcggcttcggccgcacgaatggaatcggccgcgtattcgaccggattcttgccgcgatacaccacgccgtcgaggtccagcagcgcaagctgataggcctcggcgagcgggcgatcggtgcctttgaggaaacgggtcattacgccgttcactcctcggtttcggtttcggtttcgggttcggtggagtcggagtcggcggattcggcggaatcgtcagcctcggcgtcattggcggaatcggtctcggtctcgtcggcctcatcagactcggcatcaccgtcttcagcctcgtcatcctcatcgccgtattcctgctccggatccggggcgtactgcgcctcatccggatcgatgccgagcttttcgagcacgtcggagtcgtcggtgatgtcttcgagatcgtgatcgatcaccacgtcgtcgctgttttcgtcaatctcctcgtcggcatactggtcctcaagacggtccagcaggtcgttgagctgctcggcttccttgctgcggccggcctcttcaaggaagtactgctcggcctgcacggcacgcatgcggtactcacccggcagcccctgggaacggccgacggtgtgaaccacttcaatggccttgtcccacatctccaaatcgccaagggcaccggcgtacaccaggaacatctcgaccttgggagcgccatgcagctgcttgccctcatcggacagcgccagttccacggccttcttcggctctccgacgccacgctcgcagtcagcgatgaacggcaggtagtcgaggaagccgttcatacggtaggcggtgcggaactcacgcagggccagcttgtagtcgccctgacggtaggccacgaacgcaagcgtctcgcgggcgaagtcgatgcgggaggcctgacgggccacccacttggcgtgctccaaggcaagttcggggtcgctctcctccagcgcgaaagcggcgaggatgtgcagaccaatgttctccgcgtgctccttggacaggccgcgcagacgttcgcgctcatccttggacagcatcgaccattccatgcccttgggcatcttgggctcgtcgggacgacggtcggtgtacgggttctgcgaggggaagctcatcgtgccgtcggagttacggcgcgggcgcctcatgtattcagagcgcttctcctcacggtactggcgcttctcttcctgcgaaaactcgcggaattcgccgtcacgacggttgttgtcgcggcgatcgtcacggcggaagtcacgacgatcatcgcggcggtcgtccctgcggaagttgcggcggtcgccatcacggcgatcgtcgtcgcgacggaagttgcgacgctcaccatcgcggcggaaatcacgacgatcgttatccctgcggtcatcgcgacggaagtcacgacggtcattgtcacgacggaagtcacgacggtccccatcgcgacggtcgtccctacggaaatctcggcggtcgtcgttgcggcggaagctgcgacgctcaccatcgcggcggaaatcacgacgatcgttatcacggtgctggtagcgcggattctcgccgttctcgccttcgtgggaacggtagccgccttcgcggcgcggcttgaagccttcgccgtcacggcgcggaccattgccgcggtaaccgcccttgccgccgaagccggagcggccgcccttgtggaagccgccggacttgccgtacgacttgcggtagccgccgtggccctcgccatcaccgtcacggcgcggcgcgtagccctcgccatcctcacggcgacgcggcttgaaaccctcaccatcatgacgcggcttgaaaccgcccttgccgcgcggcttgaaacccttgccgccgcggttgcccggtcggcgatcgccataccccttatggccgccgccgtaagacttgccggaacgctcgttaccttctgccattacttgttttccttaattcgttgttgattaacggttttccacggcgccgagcgccttcttgccacgacggataagcgcgaagcggcctgccaggaagtcggcttcggccagcacctgctcctcatcctcgatacggttgttgttgagatacacgccaccggacttgatggcgcggcgtgcctcggaagcggacttgaacagtccggcagcctgggcggcgtcgattacgcgatcgccgggcttggagacggggaagacgtgctcgccgttctcgtcgaccaccttgaaaccgtcgagcacggattccagcatttcctcgtcgatgtcttcgaggttgccaccgcggccgaacagcgcaccggaagcatcgatggcagcctgggtagcggcctcgccatgcacgaagctggtgacctcccaggcaagggtcttctgggcctcgcgcttgccggggttggtcttggattcctcgaccagtcgttcgatttcggccttgggcaggaaggtgaacgccttcagcaggctttccatctccacgtccgggcggttgatccagaactggtagaacttgtacgggctgagcatcgtggcgtcgagccagacggcgttgccctcggacttgccgaacttcttgccggaagcatcggtgataatcgggctggtgaacacgttgacgtccacaccgcgcaccttgtggatcaggtccaggccggaggtgaggttgccccactggtcggagccgccgagttccagcgtgcagtggtattcgtcaaacaggtggaggaagtcgttgccctgcagcacctggtagctgaactcggtgaaggagatgccttcctcagagttcaggcggcgggcgaccgtgtccttggcgagcatggtgcccagacggaagttcttgccgacgtcacgcaggaagtcgatgacggtcatcgaggcggtccaatcgtaattggacacgaaacgtacggcgttcgcgccttcggtgtccagaatgccgccgatctgattcttcaggcgatcggcccagccggccaccacgtccttcgggttaagcgtacgttcgccggactggcgcgggtcgccgatgagtccggtggcgccaccgaccaaagcgatcggatgatggcccgcaagctgcaggtgacgcatgttgatgagctgcacgaggttgccgatatgcaacgatgcagcggtgggatcgaagccacaataataggtgatgggctcgccgttcagtgcttctgcgagtcgatcccggtccgtggactgggaaatcaacccgcgccattccagttcctcaagcagggtgttgaaacccgcttccttgaagtcggtgacgtgagccatagcttgtcgcttctccctatcgaattgtgaataagactgcccaattgggcacagtcaagtttcgcagaacatggcgacagtgccgaacaccagccgagccgcgcgattcagtaaaacgccttattctagcggcgcgggcccataagttcgcgcaaagagtcgatgatgtcctgacgatccggcacctggaacttcgggaaggacttgagcatacgcttctgctgtgcgttgatgacgccattgacggcccagcgcagacgctcaaccgtatcctgcgaaagctcacgcatcctgtcggataccgcactggagccccactgccacgtgccaccggcgcgtgccgccacatcctgcaccacctgagagacggaatcgagcacccgctcgaattcgagcatgcccgcaaccgtgaccgccaagtcgatgatggtgatcagggccagtaccgtgaccagcgtatgcagcatcggcagcggaatcatatccgtgacccgctcgacatatggctgcgaaccaagtaccacgcccacgccgccgaggccgaaaatcaacgcgcccagcaggcagacgcggccttggaggttgaagcggaagttcgagtaatcccaccagcgggcgtggaacagctgctccatgacccacgaggttgtgtattcgagtatcgtggtgcccaccatcgaaatcaggaagatgatgatcgggttatgtacgttgccgagaatggcgacgccgagtatcgcgccggtgccgtagatcgggcacagcgggccgttgaggaaccctcggttgaccaagcggtgctgttggcaggagacgagaatggactcgtacatccagccgacgaaactgtagaacagaaaccagaggaaataatgttcgagtgtgatgatcatcgacgggcttcgatctcggcgtaaggcttcgcggcgggcaacgcgcgcttgttgaaccggtcgaacgagaaggtctcggcggtggcggagcatttgtccgccaaggtgaccagatagccttcgatatagcgcggcggcaccggggtcatcgggaacatgtggttctcgatgctgttgcgttcgatatcgttgagcttgaagtccttcagggcattgaccagggcggcgtggccatgggtgaagccatgccactggtgttcgccgttatcccagtcgtgccagtcgtacaggaagtaatcgtgcaggagggccgcgcgaatcagggatttgaggtcgacgcggtaccacaggtgtgcgcggtcggccatccacacagccaggcaggcgacacgcacggaatgttcgaacgtggtgacattgccgtgctggtagcagcagcgttcgatctgcatgtggcgatgctcgatgacctcacggccgtgcttggcgaccaggcgttgaatctgcgttcgggtgagcagatgtcccacgattttcggtccttcccgttttgggttggttcagtgcaatcccctgttgtgaattacgattacccggcgatattcaagaatccatcgagtaataccgtgaccgattgtagggcacacgtatgtccgtgcacactcatccaaaagaacgacaacgggaaccgttaatcgtggtgggtttcaagatagtcgagataaccttgaaaaccgccatcgaggcttgctacatcgtagccgcgatcggcaaggatttcagctacttcctcgctccaccatccttgagcacaatagactacgacagttcgatctgtgggcacggttttgagcacatgggccagagggtcgagtggtgcattgatggcaccttcgaccgggtgggcggcgaagtcggctggttccctcaagtcgagcagcgtgaccgtattcgggtcgagcttggcaaattccgccggcgtgatgcggcggtacgatgcttcactgctctcatcgtcatcgaccgcattatgcaaagcaataggcatgttcttcccctctcgttctgatcttggcacccctcaaggaggggcaccacatagctctaaatcgcgcaggccggctgaatatagttggccggatcaatagcagtaatggtcggctgctcaccgcacaccgggcaatccggcacatgctttggcagtgggacccgtcgaatattcatggtcagggcatccacagtgagcatgcgagccacgagcggctcccccacgccggcaatcagcttgacggcctcagtcgcctccagactgccgatcacgccgaccaccgcgcccagtacgccggcttccttgcaggtcggaatctcaccggcggcgggcaggtcgcggaagatgcagcggtagcaggggccttcgccgggaatgacggtcatcacctgaccggcgaatccgaccacgccggcatggatatacggcttgccggccagcacgcaggcgtcattgatgaggaattttgcggcgaagttgtcggtggcatcgatcaccagatcgtacggttcgatgaggccggcgatgttgctcgcgtcgacgagctcgtagtaggtatcaaccgtcacatccgggttgagcgcgcggatggctgtggccgcggattccactttgggcgctccgacacgtgcagtggtatggatgatttggcgttgcagattgctcatatccaccacatcgccgtccaccagtccgatatggccgacgccggccgccgccagatacagggcggccggagaaccaagaccgcccgctccgatgatgagcacgctggaggccagcaaccgcttttgccctttgacccccacacccttcaaaatcagatggcgcgcgtaccgctccacctgttcatcagtcaatgccatgttttctccatgtttccatctcccctcagtccgctacgcggccagctcccctcagagaggggagctaataaaagtgtcagtgcaaataccccgtagtcgggctggacggcacagcctgtccctcggtcactttgccaaggccagacaaatacgccgcacgaccagcatcgatggcgtgcttgaacgcctcagccatcagcgggatattgccagcagaggcaacggccgtgtacgccatcaccgcatccgcacccatctccatcgcatcgcaggcctggctcggacggccgataccagcgtcgatgatgaccggcacatgcgcgttggcgatgatgatttcgatgaagtcacgcatgcgcaggcccatattggagccgatcaacgaaccgagcggcataacggcagcggcaccggcctcctccagctgacgggccgcaatcgggtccgggaacatgtagggcatgaccacgaagccttccttggccagcatttcggtggctcggatggtttcggcgttgtccggcaagaggtacttggtctcgtgttcgatttcgaccttgacgaagtcggtgtggcacacttcgcgtgccagtcgggcgatacgcacggcttcctcggcgttgcgcgcaccggaggtgttgggcagcagcgtaatgccttcgggaatgtagtcgagcacgctgttctcggtggtctgcgcgcggcgcagtgccatggtgacgatttgcgtgcctgcatgttcgaccgtagccttgatgaggttcaggtcgtagcggccggagcccagaatgaatcgcgactggaactcgtgaccgcccaggttcagcggcttgtcttccaccgggagaatcggcgcggcggtgccgaccggattggtgacggcgggctgcggcggcagcggagtcgcctcaacagatgcttcagtaaccggattaatattgctcatagcttttcctttcatccaccctgtacaaactgcacaatttccatgacgcactggtcgtcgagcatggcgtcggcacgcttatcgcgcgggataatctcaccattgagttcgatggccacacgctcggcgcggaatccgtgcgcttcgagataatcggcgacgctgaccggcgtctcgagcgtgacctgctctccgttgacctgcataatatcctttcagatagtaaaaaagggtgcacgaaacgaaccgtaccttaagtggtgcgcccattcatgaacccaatcatgcgaccgttcgaccgctgtgatgtattggctccatcacgaccgtctcacggctgaattatgcaaacggaatgaaagctgtatcggagaacccggcaaatctgcgacaacgattccttacggcggcatgacccgcgtcaagttccccggtcgaagtctggcgacttcctctcagcctcacggctcccgttcgttacggtttctcagtgtatgccgttgcagtgacaacaacaaaatagagctccctcatcagagggagcttcattgggactagaacgtgccgggggctttgtaggcggagccatccgacgtggatgcggggaagagcttgagttcttcgacctcggccttggcgtcggcgatctgctcgcgcacgcgaccgtaagcggtgccgcccttgccgttgcgggagtcgaccgaaccgtggctggagagcacttcgcgtactcccggagccttgtcggccggcaggaacgcggcgaaggtctcgatgaagtcattgtcggtcagatcccacagttcctggccgcggccttcggcgagcttgacgcaggcaccagagagctcgtgcgcgtggcggaacggcaccccgttcttgacgagccattcggcgatgtcggtggccagcgcgaagccggtcggagcttcctcttccaggcggtcgccgtcgaagtgcatggtcctgaccatgccggtgaaggcgggcagcagcacttcgagcgtatcgacctggtcgaacacggcctccttgtcttcctgcagatcgcgagcgtaggcggtgggcaggcccttcagggtggccagcaggccggtcagatcgccgatgagtcggccggacttgccgcgggcgagctcggcgatatccgggttcttcttctgcggcatgatggaggagccggtggaatagccgtcgtcgagcttgacgaaggcgaactcctgggtgttccagatgatgatctcctcggacaggcgggagatgtccacgccggtcatggcggccacgaacgcgaattcggccacgagatcacgtgcggcggtgccatcgatggagttgtcggtcacgcgggagaagccgagctcacgcgccacggcctccgggtcgaggccgagcgtgttgccggccagtgcgccggagccgtacggggaggcgttgatgcgcttgtcccagtcgatcagtcgctgcacgtcgcgaatcagcggccaagcgtgggccatgagctggtgcgcgagcagcacgggctgggcgtgctgcatgtgggtgcggcccggcatcacggtgcggccggccttttcgctctgctcgatcagggcgttgacgaggtcaagcaggagtccggcgattacgcgggagtgacggcgcaaccacatgcgaatcaggcaggcgatctggtcgttgcgggaacggccggccctgagcttgccgccgagttcatcgccggcaatgtcaatcagaccgcgttcgagggcggtggcctcgtcctcatcgtcttcgatgggggcgaaggagccatcgtcaacgtggcgctggagcgtgtcgagcgcatcctccatgcgctgcagctcgtcggcggtcagaagtcccgcacggccgagagcacgggcgtgggcgcgggaaccggcgatgtcgtcgtcggccaagcgccagtcgaactgcgtggacttggacagtcgggccaattccggcgacggaccagacgtgaagcgaccaccccacagggccagatgttcgttgttctcagtcatgaaggctccttgaaaccatggattgcaaacaaatcagactgcttgtcagactatcagcgttgggctacataccggtggattcaagttgttcgtattccatggcggcaatgtcagggatactggtcacgtcgtattgatgaaaagaaccgcatcgtataccgcattacgggtaacgatgttcaaaacctggaaatagccgtctgccgaactcattacggagagcactgagcttcttccgtcatcggcaaaaaaaacgaggggagcacgagcataatctttgctcgtactcccctcagtcatctgcggcgacagcgtcctgtaattacggacagcctgacggctgctgattgttggctcactgtcgttcgcacctcacctgcaaacagcccactgggctgtttgctttacggcgcgacccctcaacgaggggagccaaagtaaatgattactcgacggtgttcttcgggacctcgatgccgttgccgaacttgacgtcgcgggctgcggccacgcgggacggcaggccgtagatgtcgatgaagccgttggaggacttctggtcgaaggtatcgccggaatcataggtggcgagcttgtagtcgtacagcgaggagtcggaacgacggccggtcacgacggcgcgaccgccgtgcaggaccatgcgaatctcaccggacacgtacttctgggtgtcctcgatgaacgcgttgagcgactgagtcgccggggagaaccactgcgcatcgtagaccaactcgccccagcgcttgtcgatgtcgcgcttgatgcggtgctgttcgcgttcgaggcagcagttctcaagctcctgatgagcggtaatcagggccacggcacccggggcctcgtacagctcgcgggacttgatgccgaccaggcggtcctcgatgaggtcgatgcggccgacgccctgggctccggcgcggcggttcatctcttcgatggcctgcagcggagtgacgtcacgtccgtcgatcttgaccggcacgccttccttgaactcgatgacaacttcatcttcgaccggcgggaaggccgggtcgtcggtgtaggagtagcagtccttggtcgggccgttccacggatcctcaaggaagccggtctcaatggcgcggccccacacgttctggtcgatggagtacggggacttctcggtctgggtgatcggcagcttgtgctccttggcgaacgcaatctcgacgtcgcgggtcagggacaggtcgcgaatcgggctgatggccttcagcgtcgggtcgatggaggcaatggagacctcgaaacgaacctggtcgttacccttgccggtgcaaccgtgggagatggtgtcggcaccgaactggtgggcggcgcgcacgaggtgcttggagatcagcggacgggagatggcggagaccagcgggtagacgccttcgtacatggcgttggccttgagggccttcatgcaatattcgttggcgaactcgtcacgggcgtcgaccacgtaggattcgacggctccgcaggcgagggcgcgctgcttgatggtctcaaggctttcgccgccctggccgacgtcgagggacacggccacgacgtccttgccggtgcgctccttcaggtacgagatggcgacggatgtgtcaagaccgccggagtaggccagaacaatgcgcttgttatctgccattggttccctttcgttcaaggtctgaaaaacgaactgatgcaagtatatacagaagactgtatatttatgcacggcgtgttggttatttggaggcgaggcttagtagccagtcggagcggaagacggcggtgtcgtcattggtgcagatcaccatgacggtgtcgtctccggcgatggtgcccagcacgccttcgatcggctgcttgtcaatcaccgaggccacgtattgtgcggcaccggaaggcgtgtgcaccacaaccagatttccggcggcggccaccgaggtgaccagtccgttcagcacgcgggacatctgtgcctcaccgcgctcccctacatcctcaccttctgaagcaacgacgctgcgacccaccgtgtaggccaccgtgccgtccttcagccgggtcttcaccgcatgcatctcgtcaagatcgcggctcagggtcgcctgagtcaccgcaatgccctcgtcgataaggattttggacagctgtgattgcgaggtgatgatatgcgtggcgagcgcctgttctatggcactcagccgcgccgccctggtggcagggcgctgcagggacggaccggtttcactcatgcgagcaggctttcgtctccacgggccttgccggtcaaccaagtcagcaacgctttctgtgcgtgcagacggttctcggcctcgtcccacaccacggactgcgggccgtcgatcacttcagcggtgacttccttgccgcggtaggcgggcagacagtgctggaagagcgcatccggcttggccaatgccataagttcggtgttgacctggtaatcccagaacggcttggaacggatggcgtattcggcctcctcgcccatggagacccaggtgtcggtgaacacgcaatcggcgtccttcaccgcttccttggcatcggtggtgaccaggatggagccgccggtctcggccgcgacgcgcttggcgtcggccacgatgtccgggcggggcaggtagccgtaggggccggccacgcgcacgtccatgccggccacggcaccgccgagcaggtaggagttggccatgttgttggccgcgtcaccgaggtaggcgatggtctggttcttcaggttgtcgacgccgcctcggtgctcggcgatggtctggaagtcggcgagaatctggcagggatggaagtcatcggtcagggcgttgaccaccggatgggtggagtacttggccatttcttcgacgcggccctggccgaaggtgcgccacaccacaccgtaagccatgcggttgagcacacgagcggtatcggccacgggctcgccacggcccagctgggagccggacttgtcgatgaccagcgggtagccgccaagctcggcaacgccgatggagaagctggaacgggtgcgggtggagggcttgtcgaacagtacggcgacggcctgcggaccggcgaacggctgcttgtagaagcggtcgtggtggaacttgatggcaagttcgagcacctgcttctgttcctcatggttgaggtcgtcgtcacgcagcatgtggcgaagttctggggtcatgatgatctccttggatcggtgggtcggcagtgacagagagaaatcagtcgtcgggcaggtccgtaggcacatccttgaggatggcaagtgcctggtccacgtcttgtgcggttacaatcagcggcggtgcgaaacgcagcgcattgggagccaccgcgttgacgatgagcccgtgttcgaggcagtagttcatcaccgcgtgggagcagggatgcttgagctcgacggcgtccagcaaaccacggccgcgtacggaaacgaacagcggattaccggtggccataatgccatcgcgcagctgttcgccgcgagcttcggcgttggccaccagattctcgtcttcaatcacgtcaagagtggcgagtcccgcagccgcacccagcggattgccggcaaaggtggagccgtgggaaccaggagtgaacagagccgcaagtttctcgccgaaagcgatcatgccgcccatcgggaatccgcctgccacacccttggcgaaagtcaccatatccggcgtcacgccgccggacagatcgtcacgctggaatgcgaaccacttgccggtacgtccgataccggtctgtacttcatcgatgataagcagcgcgtggttgatatcgcacagttcgcgcacgaacttgacgtaatcggcgcccaacggctgcacgccggcttcgccttggataagttccagaatcacagcagccaccggacccttgccatagcgaccgagaccggtctgtgcaaaagcgtcgtgcagggcgaccttgtcgccggcgcgcacgaattcgatgttcggcaccagcggatcatacggcttgcggataccgggtttccacgtggcggacagcgcacccatcgtacggccatggaagccgtgagtcattgcgagaatgcgtgcgggcttgccgccgatggaaggcagggcaccaggcaaggtgcgtccatacagcttggcgagcttgagggcagcttcattgccttcagcaccggagttgccgaagtagactttggagccttcaggtgcaccagccagcttgaccagttttgatgccaattcaatttgcggctcggacgcgaaatagttgctgatatgcgccaccttggcagcctgatcggcaaccgccttgacccacttggggtgggcgtatccgagggaattgacggcgatgcctgccaggaaatcgaggtattcgttaccgtcaacatcccagatgtgggcaccttggccgtgatccatgacgcgcaacggcgtaccgaacacattcatgtggacctgagagtactctcccagccacttgctgtcttccgtacctagtttttcctcatgctcagtagccataagagctcctcatttccagtccttcatcgggcataaccatggtaccgatgcctgcggaggtgaatatctcgttcaaaatcgaatgcggcttgcgcccgtcgatgacatgggcttggggcacgccaccgtcgatggccctgacacaggcctccatcttgggtcgcataccggattccaggtccggcagcatatcgcgcaggttttccacaccgatccggccaatcagagaattcttatccggccaatcggcgtacagaccatccacatcggtcaagataacgagcttgtgcgcgcccacagcggcagccaaagcggcggcggcggaatcagcgttcacgttgagcacttcagtggcatcttcttcgttcggagccacggaagagacgaccgggatacgaccggcagccaccagatcctcgactgccgaggcatcgacggaaaccacgtcgccgaccaggccgatatcggtgggcttgccatcgatgacgggcctgcgctgcatggccgagaacaggccgccgtcttcaccggacatgcctacggccagcgggccgtgcgcgttgatcaggcctaccagttcgcgtgacaccttgccggtcagaaccatgcgcaccacatccatggcctcgggggtggtgaccctcaggccgcctttgaattcggatttgatgccgagggccttgagcatgtgggaaatctgcggaccgccgccgtgcacgacgatcgggtgcagacccacctgacgcagaaagaccatgtcttcggcgaagcactgcttcagatggtcatcgaccatggcattgccgccgtatttgacgacgatacgctggccggcgaactcctccagccatggcagcgcttcaataagcacttctgccttctgatcggcgcgcaaatcggtgtgcacgtcgaaatggaacccaggtcccttcaattctgtagacaatttttctcttttctgcgacgccggcgacgctatcgctgccggctgctacaaacagcccactgggctgtttgtcagctttcgtagtcggcgttgatgtggacgtattcgtgggtgagatcgtcggtccagacggtggcctcggcgtccgagccggtgttcaggtcgatgtcgatgtggacttcgcgcggggtcatgtcgacctcgctacggtcgcggccggcaccgccgttctcgcagatgcgcacgccgttgacgtccacggtcaccttgttcgaatcgtaaggcgcgacttcaggcggcacagtgcccagggagctgacgatgcggccccagttcggatcgttgccggagatggcgcacttgagcaggttcgaggcggcgacggcacgaccacaggcaagtgccgcgtcttcgctggtggcaccggtgacggtgatacggatgtcgtgggaggcaccttcgccgtcgccgatgatctggcgggacagggatgcgcaggcctcacgcaccagcttgttgaattcgtccttgtccggttcgatgccagaggcaccggaggcgagcagcaggaccgtgtcgttggtggacatgcagccgtccacgtcgatgcggttgaacgaatgttcggcagccacagcgagtgcggcctgcatctgaccggcggagacaaccgcatcggtggtgatgacgcacaacatggtggccagctgcggggcaatcatgcccgagcccttgaccatgccgccgatcttccagccgttggagccggtcagttcgaccgtcttcggcttggtgtcggtggtcatgatggcgtgggaggcgtcggtgccggcttcggcggtggcggcaagagcctcatgggcactcttggcaccagccagcacgttgtccaacggcagcagttcaccgatgagaccggtggagcagacagccacatcattcggttcggcgccgatgagcccggcgaccgtttccgcggtggcgacggactgggcgtaaccggcctcgccggtgcaggcgttggcaccgccggagttcagaatcacggccttgacgtgaccgtcggcgacgaccttacggctccactgcaccggggcggcacagaaacggttcgaggtgaacacgcctgcagccgcgtcgagcgggccgttgttgaccacgagggccaagtccttcttgccttcgacggatgaaataccagccgccacgccggcggcggagaaaccttgtgcaaatgtaacgctcacggtgctactccgatcttggtcaggcccgcgtcttccggcaggcctagtgcgatgttcagtgattggaccgcttgtccggcggtaccacggttgaggttgtcgatggcggcaaaagcgtagatgcggccggccttgcggtcggtgacgacctgcaggtgggctgcgttggatccgatgatgttgccggtggcgggcagcgtgccctcgggcagcagcaccatgaagtcctgaccttcataggccttggaccatacggcgcgaatctcctcatcgctcagtgtcttggccttgtccgtcatgcgggcggacacggtggcgaggatacctcgggacatgggggcgagaatcggtgtgaagccgagcgtgaattcgctggcttcggccgcgctcttgccggccgcgtgggcgaagttctgcaggatttcgggaatgtggcggtgcttgccgcccaccgaatacggcagggcggattgcagggcctcggcggcaagcaggttggtgcgcttgagattcttgccggcacccgagtatccgacgaccagatcggccacgatatcctgcgattcaaccagtccttcggcgatgccgggctggagggccagcgtggtggcggtgacgttgcagccaggacctgcgatgcgcttggtgccaggaagcgccgcacgctggcgggtgtaggagccgtccgcagctttgccggtgatgagctcgggcatgccgtaggtccaatgctcatagaaatcgccgccgtagaactcatcccaagcggcctgttcttcgaggcgatggtcggcgcccaaatccacaaccacggcattcggatcgagctgcgaggcgagcttgcccgaagcaccgtgcggcagtgcgaggatgataacgtcatgcccgttcagcacttcgggcgcggtatcttcaacgaccagattggccagttggggaatatgcggcatgtgcttggccatcgactcccccactgaggaatggcctgccacgcaggtgatgtcgaagtcggggtgcgcggccagaatgcgcagcgcttcaccgccggcatagcccgtggcaccggccacggccactgtatatttcgccatactcatctcttttcactgatgtgtcttcggatgagtatacgcgattatgcagactattgcatatttatgcagtgggtgtgttggtatgtgaacgctacttatgcggagatggagtcggaggaggagccggtgccgccggtcagttgctggagggcttcctggtaaaggctcatggcgtcatagccattgaaggccatccagatgacggcgatggtgtacagcacgttgattaccacggcggccacggccaaaccgaagcccttcatatggaaagtgcgcgtgcgccacattgccaccgcgcccatcagtgccgagagcactggcaccgggaagaacagggcgaggataaaggagatgatcgcatacgaatcccagtgcccgtagagtgggttctggtttggatcgttcaggtcgatgccgtggtaataatgcggctggtgaggctgaccgttcggctgttgaccatacggctggccctgcatgcccgggtacccgcccggatatgcgcccggaccggactgttggccgccttgagcgtacggccagccgcccgcctgctgattgccgggccacgccggctgctgaccatacggctggccagcctgctgagattgtgccgcgccaccgttatcgccagcggctgcggcggaatccttcttagtatccggctcgggagcgccataaatatacgggttgtaattcggcccgtattggccagacatagcaccatattcaggctgctggtactgcccgtatttcggcttgtcctgctccgcttggctcatggcgctcctcgattcggatgattggttgggtcaggcgcgcagctgggcgccgatttcggcggcctcagccacgatggccttgcggatggcgtcgctgtcttcggcggacagcgtcttgctcggtgaacggaacaccaccgcataggccagggacttcttgccctcgcccacctgttcgccggtgaacacgtcgaacagttcgatggattcgaggttcgcgccggcggccttgcgaatcacgttctcaagctggcctgcggtcacggtctcgtccacggtgaaggccaaatcctgcttgaccggcgggaacgtggagatcggcttggcctggacgggcttgccggtcagcgtggcgaacagcgcggtgaggttcagctcgaaggccgcggaatgggccgggaaaccgagcgcctcgttgacgcgcgggtgcagttcaccaacccagccggtgaagacgtcgcccaccatgacgcgggcggcgcggccggggtgccattggactggcacatcgtcggcggcgggctggtcgagttcgattgcggcaccgatacggccggcgatgcggcgcacggcctcgacggcgtcggaccagtcgaccgggcgcttgccgcccatccagccgtcgtcctcggccagaccggtcaggatgccggccacatggtcgggctgttcgggcagaccggcgtcaagcgcggcgagctgttcgtcggtggggcgcacgccgccgggcagtgccgggatggcgggcgcgttcggatcccacaggtagacgtggccgagctcgtacagggacacgttttcgatgccgcggcggatgttgcgctgcacggtggtggccagggtcggcagaatctcgcgacgcaggtacggacggtcgccgtagagcgggttggcgatctcgacgctgaccttcttggtggcttccgggtcgaagccgaaggccttgtaatcgtcgtcacccacgaacgggtagctcagcgattcgaccatgccgaactcggcgagctcgtccgccacgcgacggcgacgctgctggtccggggtcaggcccaccagaccctcgaccggtgccggcggcacggtgatcggaatctggtcgtagccgaccagtcgggcgatctcctcgaccaggtcgcacggctcgttcaagtccggacgccagctcggcgcggttacggcgaactcaccgttgccgccaccggccaccgtgcagccaatgtcggtcaggatgtcggagatgcggttgatgtccacgtcgaggccggctacgcgggccacttcggaggccttgaagtggatggccttggcgcgcggcgtgttgttcacgtcgttcgggtgttcgctgggctcgccgttgccgtacttggccatgagttcggcggccatctgggtggcggcaggctgcagcgcggtgtcgacgccacgttcgaagcggcgggaggcctcggatggaatcttgtggcgacgggccgaacgggcgatggtcacctgatcgaagtgcgcggcctccagaagaatgttcttggtgtcggcggtcacttcgccatacaggccgcccatcacaccggcaaggccgaggatgcgcgagccgcgttcgccgttcggcgaatcggtgataagcagatcttcgacgctcaggtcatgttccttgccgtccagggtggtgagtttctcaccctcgttggcgcggcgcacgacaatcgggccttcgagcttgtcgaggtcgtaggcgtgcatcggctggccgaggtcaagcatcacgtagttggtcacgtccacggccaaggagatggagcgcatgccggcgcggatcaggcggcggcgcatccagttgggcgtgtgggcgttgggattgaagtccttgacgatacgcgcgtagtagcggtcgcaaccgggcacgccgtgaatcggattgttatcgtcgatttcaacatcgatgtccaccggggtgccgggctggtagtcagcaggttccggggccttctcgttgagtgccacggccggatcggtgtaggcggcaccggtggagtggtggtattcgcgggccacgccacggtaggacagcgtgtagccacggtccggggtgatgttgatctcaagcagaggctggtcgaggtgcagcaggtgcatggcgtcctgaccaggcttcagagcctcgtattcagcctcggagaagccatactgacgcagcaggatgatgccattgtggttgtcgcccagacccagctcacgttcggaggcacacatgccgttggagatgtggccgtaggtcttgcgcggttcgatcttgaagtcgccgggcagcacggcaccgggcagggtgacgacgaccttttcgccggccttcatgttgggcgcgccgcagatgatgccgcgcggcaccttgttgccgtcttcgtcggtctcgttccattcgtcgccgcagtccacgtggcaccagttgatggtcttgccgttcttctgcggttcgggggtggcgtcgaccacgtagccgaccacaatcgggccggtcacctgagaggagtgaatctcctcttcctcaagacccaccttgacaaggtccttggcgagctgttcgtaggtcaggccttcgggaacctcgacatggtccttgagccaatcgatatcgatcataggcatggctgaatcactcccccatcacaaactgttcggcgaaacgcacgtcaccttcgaccaggtcgtgcatgtcgttgatgtcgctgcgcagcaggagcgtgcgctccatgccgacgccgaaggcgaaaccggtgtagacgtccgggtcgatgccggcggacttcagcacgttcgggttcaccatgccgcagccgccccactcgagccagccggggccgcccttcttgtcggggaaccacaggtcgagttcggcgctcggttcagtgaacgggaagtagctcgggcgcaggcgcgtcttggcttcagggccgaacatggcgacggcgagcttgtccagcacgcccttcaggtcggccatggtcaggtgcttgtcgacggcgagggcttcgcactggtggaacaccggagtatgggtggcgtccagctcatcggtgcggaacacgcggcccggggacgcgatgtacagcggcactccacgggtcaggagggcacggacctgatcggaggaggtctgcgtacgcaccaccatgttggagccgacgaaaccggcggcatccttggcttgattgcccttgacgtagaaggtgtcctgcatctggcgggccggatggtccgggccgaaattcagggagtcgaagttgtaccattcggcttcgatttccgggccggaggagatctgccagcccatggagatgaagaagtcctcgacgtcctccatcagcttaggcagcgggtgacgggcgcccagaggcttacggctcaccggcagcgtcatatccacggtttcggcggcaagcgcggccttctcggcggcttccttgagctcgacctccttgggaccataggcgcggccgaagtcggcgcgcagcttgcccatgagcttgccggcttccttcttctggtcggcgggcagggagccaatggccttgctggccttggtcatcgccgaatcggcacctgcgtacgttgtcttgatggccttgagctcctccaggttggaggcgttctggattttctcgatgccctcggcaacctcagcggtcacctggtcggcgtcgaacaccatttgttctgccacgagaaccctttcgtctgatgttttctcagcgtttcacagcgtttttaccggtttcacattctttcaacatgacccgacatagacagcgacatcagcatcaccgcggccgaggtgccgaggttcagcgattcggccttgccataaagcgggatggagacgatgcggccgcagcgcgtgaggatgtccggttccaagccacgcgcctcattgccgaacagcacggctttcggagcctcgaccgccgccttgtccgccagtactgcgggcaggctttccggcttgcgttcttcggtgccgtatacgtcggcggcccagacgtccatattatggtcgcctgtccaggtgaagaattcgtcggtgctcatggcgagtaccggcagatggaacagggagcctgcggtggagcggatgaccttggggttcagcacgtccacgcagtcgtccacgaagattacggcgtcgcagccggccgcatcggccgcacggatcacggtgccggcgttgcccgggtcgcgcacctgccagaaggcggcaatctgcggggcccgaccgttcttgccaagttcgacgtcatcggctccggcgtgcatggactcggcattgccgacggccgcgatgccttgggcgtccggactgatgcggcgcatcacgtcgccggtgcagtagtgcacataaatcgtggcatcctgcgaggtttcgacgatcttctccaacgtggaggagatgatacgcggatgttccagcgcctgcgaaacctctacatacaggtcctgcaccacgtccggccgccaagtgacggcctcgcgcacggattgcgggccttcgataagaaaacggcccgaacgttcgcggcctttggcgcgggtcagatcggcgatgcggcgcacgcggtcggatttcggattatcaagaatctgggcgttgatgggcatagccactaccctactgccgggtcattacgtcagtcgcgagactgagggtggtcgaggctggaaccaccccagtcggctacgccgacagcccccgccagcgggggcatcataaggcgttcagacaccttgaaaggcactgtgctaatctgtcgcctttcagacaccctgaaaggcactgtgccagtctgccgcctttcagacaccctgaaaggcgaagtgccaattcccggtgccgacggctacgcctatggaggccagcgggacggccagacagatgacgtagaagatccagtcgataggcttcagacgcgagatgcgggcttgggaacgtggggcgccggagccgaagccgcgcgcttccatggcggtggcaagtttggtggcacgccggatggagagcaccagcagtccgaacgcttgggagagggcacgggcgatggcgttaccgtcaccaaggccgcgcgaacgctgggacaagccgagtgcgcgccaatcttcctgcagcagcgtaaacatgcgcaatccggccaatccgccgtatacgaatcgcggtgagaagtgcagaatctcaaccagaccgtccgccaaatcagtgggatcgaggcccaaggccagaatcacgccgggtacggcaatggccgccaccctgatagccgtggcgatggccagattgatggatccctcgctgatcacaatccagccaccctgccacaggatctcgcccgaggtgcggccgtagaggaacacggagataaaactgccggcggcggcgatccataccggccaggtcttacggcatacggtccacggagccacgccgccaatccacagcagcacgaattcgatgccgagcgccgtggatgcggataccgcatccagactgatgaacatcggaatgcacagcaacagcgcaccgatgatgcgactgaccgcgttgatgcgcgcgatgaaccatgagggcgatgaggctttgaccggctccacgcgcgtttcctgcgggctgacggttaccacgtcactcatgccttcgcctcctcgaacatcacacgtcgtgcgcccagcgcatccaccagcgcctcatcgtgcgtcaccatgatcacgcacgagccttggtcgcggatggcggcgatcagcttgaccatttcattccacgtactgaaatcctgtccgaatgtcggctcgtccatcaccaacactttgggtgcggcggccagcatggaggccacggacagtcgccgcttctccccgccagacaaggtgtacgggttggctttggcgaagcgcgtgagattcatctgctcaagcatgcggtcggcggtccgataagcctcgtcttggctctgccccatcgacttggggccgatggatacctcgtcacgcacaaagttggcagcgaactggtgttcgggctcctggaacaccatgccgatacggcccagcagttccttgcttttccagtcgatcggctcacgcccggcatgcgcgggcttgaggttgtcggcgatgagcaccttgccggcgataggcttgagtagcccggccaaggtcaaggccaaggtcgatttgcccgcgccgttcggacccatcagagccgttacttcgccgggataaaaatccagattgataccaacgccaagagcggccccacggccaaagcttaagttctcggtgctgagcaccggcgcatcgtgcgcagactcctgcttcggtgagtaatcgggaatcgcacggcccggcacccacgcgccaccggcggccaacacgtcgcccatctcggcgaacacctcgtccggcttgccgtcggcaatgaccgcacccgtgggcgaacttgcatcgggtcggccgagcacaatcacgcgatcgaccagatcgagccatacatcgatatgatgttcgaccacaaccatggtctgtccggtggcctcgatgacctttttgaccgcgtcatgcacttcgaccacgccttcgggatcgaggttggcggtcggttcgtccaacaacagcagaccgggcttcatagccagcacgccggccaacgcgagacgttgacgctgaccgccggacagatggcgggtggaccgatccagttcgagtccgccgagtcccaccatatccaatgattcgcgcactcgctgccaaatctcctcgcgcggcacgttgaggttttcgcagccgaaggccgcgtcatcgcccagtcgttcaagaatgatctgcgagtccgggtcctgaagcaccagtcccacgcgacctcgcgcctcgcgcgcatcgacgccatcgatggtgagcgagccctcctgctcgccttcctcatcgccgccaagtacgcctgcgagaccggccatcatcgtgcttttgcccgcgcccgaagcaccgagcagcaacacacgttcacctggccggatggtgaaatcgacggcacgcaacgcgaagtccttacgcgtggcgtgccgccatccccagccgctggcctctaccgcagccggattaatctgcatcagacgcgcgccttgctgcggccggattcaaaacgctccagagcaccggtgacggcgagcgcacgagacaagtaccagaccaccacgccggcgatcacgacgccggagatgatggagcccaccagataccaagtgacgcgcaggccgttccagcccgggttggtggcccagtagtaggcccagcagcccacgccggcgagcgcaccggacaggatggtggtgccgatgttccacttcttccaagcgaagacggcgaaggcaatttcggcacccagaccctggatgatgccgacgatcagcgagccgccgacgccccactggttgcccagcgtaagctcaaggaaggcggcgagggtttcggcaaacagtgcggcaccgggcttgcgcacaatgattgcagcgagcgggccggcgaacagccagaatccgttgagcagaccctcgaaaccgggggtcacgccttcaaacagggccagcggggcggagcagacaatgtcccagccccagaaaatgacgccggatgcgacggcgatgattgcggcgacgacgatatcgacgacgcgccacttgtaattggctttggccacagcttcagtcatgaatgtgcctttcttctgctcgcgcgtaggccgaacatacgtggatatatgtacgcacatgatgcatatgttcgtggccacgcgcgggttggttcaggcacgggtaggtaagagcgacatttccgtgcgccggcattatccggtcacgttccatcggtcgagactatgagtctcctctcagccgcccaacggcagctcccgtgtcaactcccgactataaagcaagccgccgtcaaaggcaatagccacatctgtaacctacctgacggcggctcactaccattaccgatgcggttcggctacttgccgagcttgtccagcagcaaagcctcggtgatcacgttgttcttgaggccgggcagggagatggactcattggggctgtgggcgttggccttcgggtcttcgggaccggtgaccagcacctgagcgttggggaaaatgcgctgcagttcggggatgaacggaatggagccgccttcgcccttgttgatgggctcaacgccgaaggcctcggtcatggcttccagcgcgtccttggtggccacggcggtcggatccatggcccagcccatgccgttttcgccgcgttcgacagtgaccttggcaccgaacggcgcgtgggattcgaggaatgcagccagtgcttcctgcgcttcttcagggcgctgggtgggcgcggtgcgcagcgacagacggaagcgggtctccggggcgatcacgttgaaggatccctcgaccgggtgggcgtcgaagccgatcacggtcacggacggcttggtccacaggcgtgaggccagtgaaccggtgccggcgaactcgtaaccggccaccacgccagaatccttgcgcacggtggtttcgtcaaggtcgtgctgcaaaccgccgatcggctcttccgcggccacgccgggtacggccagatcgccgttctcgtcatacatggaagcgatgagcatggcggccaacgtattggagtcgagaatcgggccgccgtactggccggagtgcaccggatgctcaaggccctgcacggtcacgtccacacaggtgttgccgcgcagcgaggtggtcaaagaaggaatgtccgccgaccagttgccggaatcggccacgataatcacgtcagcggcgaattcgtcgcggtgagcctcgatgaagggaatgaagcttggcgagcccatctcctcttcgccttcgatgaacactttgatattgacgttgaggtcgtcgcccagggccttcagtgcaccggaatggatggcgataccgccgccgtcatcggcggagccacggccgtagaggcggccgtcaatttcggtggccacgaacgggtcggtgttccactcggccgggtccggaacaggctgcacgtcgtgatgggcgtagagcagcacggtgggggcgtccggagaaacgatatgcgagccgatgacctcccatgcgcccggagtgccgtcggcattggaagcctgaaccaccttggtatccacacccacgaggcgcagttcgtctgccacgaattcagcggagcgcttcatttgttcggcggtgatgcccttggcggagatcgactgcagcgcgaccttttcggccagtaccttgactatgcggttccaatcggtttcgacgcgcgaacgaatctcgtcagcggtgagcgttgtcatgatggtcctcctttatatatgtgtgagcggcgtcattgcaatggctgcgccagtgtacaagtgtctgaacgtcaccgtaacctcaaagcatgacatggaatccgtttaagaaaaaagaagaggtccaggctcctgttgagcaggccccgaagaaggccgccaatccttctgagaaaaaaggccgtcctaccccgaagatgaagcaggctcaggccgccggtatccgtccgctggttccggtggaccgcagggccagcgccaaggccgccaaagcccgtctgcgtgagaaggagaacgccgagtacgaggcgatgcagaatggcgatatcaaccacatgcccaaggcggaacgcttgccttggcgtatctacatccgtgattatgtggatgcccgtttcaaccttggtgaatggttcatcccggtggccttcgcgattctgatcgtttccatgttcgtcacttctttgatgcagaaccagtgggcttccatcatcatgatggcgcttatgtacggttacctgattgccgtgatcatcgacgtatggctgatgtggcgcaagctcaaggccaagctcatcgccaagtacggcgaacggtccgtgtccaagggctcccgctccttctcctacgcttggagccgttcgattcagatgcgtcgttggaggcttcccaagccgcgttacccgaagcgcggtcactggccggcggactgattgtccatatatactctggctcccctcgttgaggggctgagccgtaaagaaaacagtccagtggactgtttttaggcgaagtggcggcgatagccgcatatggctccctagcatgggagccatacttatatgtatcaaggaggcaatcatgagcgaacagtttgatctggtcatcatcggggccggccccggcggctattccacggccttgcgcgccgccgaactcggcatgaaagtggcactcgtcgagcgtgacgccaccgtgggcggcacatgtctcaaccgtggctgcatcccctccaaggcgctcatcaccgccacccacaccatcgacaccgtgcaccgtgcggccgagctcggcgtcaacgcctcggtgaatggcatcgacttcggcacgctgcgcgactatcgcctgcgcgtggtcaagacgatggtgggaggactggccggactgcttgcccatcgcggcatcaccgtgttccgagccaatgccgcgttccatgcggatgagaccgctccagcaacttccaaccacatcgtccacctcgtcccttcccccgaccaaagcgacatcctcacctatcacaaggccgatgtccccgagcccagcggccccacgatggacctcacggccacgaacatcgtcatcgccaccggtgccaagccacgcccattgcccggcaacccgttcgccggcgccctcatcgactccacacaggcgctggaagtcaacgaatttccctcgtcggcggtgattatcggcgccggggccatcgcccttgaattcgcctcgatgtggaacgccgccggttcgaaggtgaccttgctgattcgcaaggaccgtgtgctctcagcctgggaccggagagccggcaccacgctgacccgtgagctcaaacgtcatggcgtgaacatcatcacccgcgccagcgtcacccatgtggacaccggcgcgaaccttggtgccaccgtgcactacacgtgcgaaggccaggacggcgaacaaagcgtctggggcgaaatcgcccttgtcgccatcgggcgtgacccgatcaccgacccagcatggggcgtgacgattgacgaccacggacatgtcgccacggatgcgtacggccgcaccgacaaaccgggcgtatgggcggtgggcgatgtgacggccggtcacgcgctggcgcatcgtgcttttgagcaaggcatcgtcatcgcggagaccatcgccggactcaatcccaagccggtggacgaagccaccgtgccgcaaatcgtgttctccttccccgaagcggcgtcggtcgggctcaccgtcgaacaggcgcaggcgagagaggatctcattgaaatcaaggagaccaactatccgatgctggcgaacgcgcgcatgctgatgagcggcacggccggttcactgaccatcgtctccggctgcgacgcggccaacccggacaccccgcgcgtgctcggcgtgcacatggtctcccagatggcctccgacatcatcgccgaagccgaacagctggtcggcaaccatgtgccgctcgccgacgcagcccgcctcgttcacccgcatcccacgttcagtgaaacgctcggcgaggcgctgctcaaggccgacggacggccgttacacacacgctgagaccaaccagcacaaacaagttcggaccagcgcacctgataagatgttgtctagtgtgtttcgtcccaacaaaggaagaagtgatggcggaaaaggacgcgaagccgaagaagcagagcacaatcaagcagatcatccagatctacaagtacacggctaaggaagacaaggccctgccgtggcttgaggccggtgctttcctgctgcctgtagtcgtgatgatcatcatcggtctgattgccaagtggacctggctgacctggatcttcaccatgatcaccgccatcatgctcggcatgctactggccaccatgatgctcacccgccgcgcggatgcagtcggctacaagcagattgacggcaagcctggtgccgccatcggcgtgctgagcaacatgcagaaagccggctttgacttcccgcaggaaccggtgtggatcgacccgaagaccaaggatgccatctggcgcggcacttcgatgaacggcatctacctgatcggcgaaggcgaatacggtcgcgtcatgaaggcgatggatcgtcaggaacgcgatatcaagggcgtcaccgccggctcctccattccggtgtaccgcatcgccgtgggccacggccccaagcaggtgccgctgaccaagctgcgtagcacggtgatcaagtccaagagctatgagcccacgcaccacaagaacgcactgatcgccaagattcatccgcgccgtcgcttcctgctgaccaaggccgagatggaaacgctgaacgatcgtcttcgcacgctgcaggccaagaagggctatgccatccccaagggcatggatccgaaccgcccgcagaagatctcccgccgcgcgatgcgcggtcgctgatcggcagcacacaaccaaatcgcacagaagccccggaatccgttcaatcggttccggggcttcgtcatatgtctcataatcgcgtccacatacatccacctacatcacctgtcaatacccactgtccacgttgcggacatctctatctactcccccgatagcctccgtttccattctgtaatgatgtttcgttgaaataacgcgcctgcgcgattgtcggccacagtcacgaaacattctcgtaacccaagtttcgagccggcgaaacgcgcgattttacgatggataccgttatatctcatacgaaaggagcggtcccgtgaccgagctcaagtccaaggaagacgtcgaggcccttatcaacaaggaaggcatcgagtatgtctccgtccgtttcaccgatcttatcggcgttcagcagcacttcaccgtgccggctagcgaattcctgaaggacgctttcaccgacggcatgccgttcgatggttcctccgttcagggcttccaggccatcaacgagtccgacatgaagctggtcccggacgttgagacctctttcgttgacccgttccgcaagcacaagacccttgacgtggccttctccatcgtcgacccgctgaccgacgagccgtactcccgcgacccgcgtcaggtcgccggcaaggccgaggcctacctgaagtccaccggcatcgccgacaccgcatccttcgctcctgaggccgagttcttcatcttcgacaaggtccgcttcgagaacggcatgaaccgctccttctacgaggtcgactccatcgaagctccgtggaactccggcgttgacgttgaggaagacggcaccccgaacatcggtttcaagaatcgcgtcaagaagggctacttcccggttccgccgattgaccacacccaggatctgcgcgacgatatggtcgccaacctgcagaaggtcggcctgatcctcgagcgttcccaccacgaggtcgccggcgctggccagcaggagatcaactaccgcttcaacaccctgcagcacgcaggcgatgacctgatgaagtacaagtacgtcgtccacgagaccgccgctctggccggcaaggctgcgaccttcatgccgaagccgatcgccgacgacaacggcactggcatgcactgccaccagtccctgtggaaggacggcaagccgctgttctacgacgagaagggctacgctggtctgtccgatctggctcgctggtacatcggcggtctgatcaagcactcctcctccgtgctggccttcaccaacccatccctgaactcctaccaccgtctggtcccgggcttcgaggctccggtcaacctggtgtactccgctcgtaaccgttctgccgccatccgtattccgctggccggcacctccccggctgccaagcgcatcgagttccgcgctccggatccgtcctgcaacccgttcctggccttctccgctcagctgatggctggcctggacggcatcctgaaccacatcgagccgccggagccggtcgacaaggacctctacgagctgccgccggaagagcacgctggcatcaagcaggtgccaagctccctggccgaggctatggacgccctggaagaggaccacgacttcctcaccgccggcgacgtgttcaccgacgacctgatcgagacctggattggcctcaagcgcgacgagatcgaccaggctcgcctgtctccgaccccgctcgagtacgagctctacttccacatctgagtttgagagcttagcaacgttggagttccgccattgctcttctcttgtgggagtctaatgggagtcattcagcgtaactagaaagaacctcgtgaaattcgtttcacgaggttctttaggctggacataaagcccacggccgcacattcatcgatgaccaggaagccctcgcggtcagccatcctgaggttctcttcgctatacgggtagtgcgaggtacggaaggagttcgcgttgacccatttcatgagttcgtagtcgcgcttgatgacggccggattctcgccgcgaccgttgataatgctgtcttcgtgacgaccgaaacccttgagattatctttcggccagaacaacagaaaatggttctgattcgtggtaaaaagaatagccagcatttatttatgaatgagatcccaagcgccggaggcccccggcattcttttcgtcgaaggggacaattcagaacacgaccgccgacacaatcgtcagggaggccagcgagaacagcgtgcttacgagcacgaagccgaccgcatactcgggcatgttgttcttgcgaccggtgaacatggcaatggtggtcatggtcggcagtccggcgatgaccgtaatcatcagcaccatgtcatgggtgatcggcagttgcggcaatgcgccggtcagcgcggtcagtagcgcgtagaaggcgagcgggaatgcgatcatcttggcgactaggccagcatagagttcgtagcgtttgaggacgccccaccacttggtcagcgcgaacaggccgcccaagtagattagcgacatcggcgtggccatattgccgatggtgtgcagcggcttcaggatgatgtccggcaccttgacgccgagcagaatcagaatcagggcgagcatcacgccgatgaaggcgggattgacgaatcgtttaagcaggccgaggacgcgggtgcctggcgaggggcggacgacggccggagaaccaccgtttgcggcattgctcgccgaaccagcattgcccaccgaaccggcgccgttcaccgaaccgttcacgaccgcacctcgcgcgccaatcgcgttgccgccagtcgtttcgtcgaccggctcgcacagccatacgccgtacgtccagagcagcgtctggtcgatgatcgacatcagcgccacgtaaatcgcgccgttctgcggccaaagtgccataatcaacggaatgccgatgaatccggcgttgccgaaaataagcgacgcctgaaatacatggctacgcgaacctttgagccgcaacagttcggcgaccagccagaacaccaggatgagcagcgcgtacatcacggcggtcagcagcatcacgccccagttagaggcaagctgcgcgcggtccgcgccgtcgacggcgttcgagaacacgagcacggggatgagcacgttgagcagcaacgagcacatgccgtccaacgccgtctgaccgtagaatcgaagcctcacacatccatacccgaccatcagcatgatcagaaatccgactaactggccaatcatgacgccgaactgccccatgcacactcctctcgctcgcgttcccgtgcttttctgtcactggttcatataggcagccatctggacaggctcggcggcacacgcatcagtatgttcgataccatcacatgccaatccacttctcgttcaaccgttccccgtgctaatgcgccgccggccaccccgtgttgccggtgctgcgcgagcaccattacacgtattgcattccggtgatcagcgggcgcaacgtgtgggtcggcgcgaacgtgtcgattctgccgggagtgaccatcggcgacaattgcgtgattggcgccggttcggtcgtgacacattccatccccgccaactccgtcacctacggcgcgccctgcgaggtcgtgcgtgaaatcggcgacaaggaccgcgagtatttctacaaaaatcgcaagctcgacatgtgggagtgagctttcgcgctactgctctttgagcttaaaacgctcactgaattggcggtcgcgccagtagtagacgtcgtcgcgttcgttgatttcgcgaattaccttgcacgggctgccataggcgaccgtgttggcggggatgtccttggtgaccagcgagttggcgccaatgaccgcgttgtccccgatggtgaccccgggcagcacggtgacattcgcgccgatccagacgttctcgccgatgtggacgggcaacgaatactgggcaccctgatagcgcaggtccggacgcacgggatggccggtggctacaagcgtgacgttggggccgatcatggtgtgggatccgatgaagatctcaccatcgtccaccagcgtcaggttgaagttggcgtaacagcgctcgccccaataagtattgcagccccagttcgcatacaccgggcattcgaggtacagaccctcccccgccgcgccgaagaacgcctgcatgagttcggtacggcgcttcgggttggtcagcggcgtggcgttgagttcgagctggagatcacgctgggcggcctgcagatcaaaaaagccgtccacatcatccggcaggtagacctcgccagagaacataagcgccattttctcgcgcgtcgcatcatcgataatcggcttggcgatcggcttgtcttcggtcatcattggctcctgttcggcgttttggcgattgcgtcggtcgaactattctgtcacagactcgttttcgacacccagcatcgagcgcagccagtcaaggattcagatgtgcgattggcaccgtgcgggcctcacacttttcttattgagaacgattcgccgtgcagtcaagccctccatccacccaaaaaggactcgcttttggccgcgtcgtcgcggtaggccttgccgaactcgtcaataagcccatggaattcctgcaaatccttgacgctgaggctcgcatccagcaccacgggcgaataggccttgtggaatgccagatagccggctggcgcatcaaatccaaggaaggcgaatagtcggcgagcataagtatcggccacgaatgtgcggcgcgaaaacacatatagcatcaggtcgtcggccgtttcgcccccgataccgaataatccgagcaattcggtccgcaattcggcgtcgggaatatctgccgcgccctcaggcgaggctccgcaacgctccacataccatcggctcagtgactgtaccgtcttggatttgttgacataaaagccggacgggcgaataagttcctgcagatgcgctggccccataatcgccagcttatggggttcgagcacaccctccgcgttcaacgccgcaagcgaacgattcacattgccccacgccgtattctgcgtcagcaccgcgcccaccataatctcgaatgtggtttcagccggccaccatccggtcgggccaagggcggcagccatggtgcggtacagcgattcgatatacgcgggagaaggaacgcccggcacccgctttgcacttcgattattcatagttgccatctaccattcaccgcaattcatgcaggattcgccgcatgaacgggatagtgactaggaatgtcagcacgtcggacaccgattgcgccatttccacgccgagcacgccgaacatcatcggcagaatcagtacgatcggtgccaaaaacagaccttgtcggcacagggccaggaatgaggcgatgccggtgcggcccatggtctgggtcatcatattgcccatcatgttgaagccgttgagaatcaccgtgcagcattggatgtgcagcgcggccacgcccaccgccaccacggccgggtcggagcggaagatctcgaccagttgcggtgcgaacacccacagcaacaccgccaacaccacgagcacgcaggtggcgagccgcacgcagaaccagtacccttctttgacgcgcgcgaacaggccggcaccgtagttgtagccgcacaccggttggaaaccttggccgaggccgacgatcaccgagttggcgcccaacataatgcgcatcacaatggccatgccggcgatggccgcatcgccgaacggattggcggcaatgttcacgcaggtcacggaaatcgaaccggcgccttggcggatcagcgagggcaggccaccgccggccacttcgcgcatgagcagcacatccggcctgcaattgcgcagggacagtttcatcacgccgaatttgcggctcattgtggtcagaatcgtgaagctcaccgtctggcagatggcggtggccaggccggcaccaaaaattccgaggtgcagcacgaagataaacaacggcgcgagcaggaaattcagcaatgcgcccgaaaccagcccgatcatgccgaacgtcgattgcccttggtatcgcagcagtccgttgagtgcgaacgaaccgcatacacagggtgcggcgaccaacaacggcgtcaggtattgcacggcgtatggggcgattgtcgaggtcgatcccagcatgacgaccagcggccgcagggtcagcaatccgattgtggcaatcaccaaaccagagagcaccgcacccgcgaagcccacggccagtagtcgggaggcgcgctcattgttctgtttgccgagttcgcggctcatcgagttgcccgcgccgttgccaaagaagaagccgagcgcctgcatcacggtcatgatggagaacgcgatgccgatggcaccggactgcgcggtgccgagctgaccaataaagaacgtgtccgtgagattgtaggcggtggtcaccaagttggagatgacggccggcaaacacagtttgagaatcagcggcttgaccggctgcccggtcatctgccgatatttcgcgtccgcgcttgcgcgtctaatgccatgaatctgcaccatggacggctatcctactcgcgcagggtcctatgcaaaggcgcgttaccgccatacgagtcagcgcagataccgcccggtgatgctgttcggattggccgcgatttgttccggcgttccggtggcgacgatgcgtccgccgctttcgccaccgcccggacccatgtcgatgatccagtccgcattggcgatcacgtcaaggtcatgttcgatgaccacgactgttgcgccgctcgccacgagccggtcgaacacgcccagcagcacgcgcacgtcgaacgggtgcagaccgatggtcggctcatcgaacacgaataccgcgtccgattgggccttgcccatttcactggcgagtttcagccgctgggcttcgccgcccgaaagcgccggcgtcggttcgccgagcgtcaagtagccgaggcccaagtcgtgcagggtggtcagacgtgcgtgaaccttcttgaggtcgccggtcacggacagcgcctggtccacgctcattgccatgagttgaggcaggctcagggaaatgttgccgccaccctgatccgtcgcctcactcaatttttccttggcagctttgcgtttatccgggaccttcatcttcgccgctttgcccttagccgctttaaccgcacgccgaatcgcgtcggcttcggacgcatagcgggagcctccacaatccgggcattcgatggtcacgtccggcaggaactgcacatcgagcgagattgaaccggtgccgtcgcatgtggggcaacgcagtcggccggtgttgtatgagaaatcgccagccttccagccgcccgccttggcgccgtccgtgcgggcgaaggcgcggcgcaattcgtcgtgaatatcggcataggtggccacggtggagcgtacgtttgcgccaatcggcgtggcgtcgatgagattcgcacgatggatgccctcggcctcaagttcacgcacatgttccggcaaccgctcccccgccgcctgcgctttgagcgcgggaatcagcgattcgagcaccatcgtggttttaccggagccggagacgcctgtcaccgccacgagccggccgcgcggaatatcaacgtccagcggcttgaccgtatgcaactggctggttgtcatgcggatgcggccaaggtcgaacacctgcggttccgccacgcgctcacggatgcgcgcgctcacattatcggccaagaacggcgcaatacgactacttggattcgccgccacctcgccgaccgtcccttgcgcgatcacatgccctccttcggcgccggcaaccggtcccatttcgataagatggtcggcggccttgagcacgcgcacgtcatggtccacgaccaccacggaattgccgtccgccaccaagtcatgcatcacgccgagcagcccatccacgttcgaggggtgcaggccaatggacggctcgtcgagcacatacagcacgccggtggtgcggttgcgcacggcacgggcgagctgcacacgctggcgttcaccggttgaaagcgtggcaccggcgcggtcaagcgccagatagccgaggcccagatccaacagtcggcgggccacgtccaggaatgattcgcagatgttggtggccatcggccgcatgtcggcggacagagattccggcacgccgcgcacccaatccaccgccgcatccaaggtcatcgcgctggcttcggccaggttcagcccgcgcacatgcggggcccgggctgcggcgctcagtcgtgtgccgccacagtcggcgcatggtccctccttgagaaatcgagccacgcgcttcagacctttctcgtccttggctttggcgagcgcgttctccaccgtgtatacggcgttgaagtaggtgaaatcgagttcggcgaaatcgtcgcctttcttcggcttgtaaagaatatgctttttgacggccggcccgttgaatacgatgtcgcgttcttcgggtgtgagttcgttgaacggcacgttggtgcgcacgcccatcgcgccgcacacctgtttcatgaggtcccacatgagcgaaccccatggcagcaccgcgccgtcgtcgatgcttttcgactcgtccgggaccagggccgcgcggtttacttcgcgcacaatgccggtgccggagcaggtcgggcaggcgccggccgagttgaaagcgagcgattcggcgccgggcgcgtggaattccttgccgcagccagcacaggtgatgggcagtccggccgccacgttcagcgtcgactcgttgcgcgccccgcaatgcgggcacacgtgcgaggcgacgcgggagaacaggagtcgcaggctgttgagcaattcggtcatcgtgccgaacgtcgaacggatgccaggcaccgtgggccgctggtgcagggccagcgcggccggcacgtgcagcacttcgtccacctgggcgcgactggcctgggtcaggcggcgtcgcgtgtacgtggacagcgcctccaagtagcgccgcgaaccttccgcatacagcacgccgagcgccagcgagctctttcccgaaccggagacgccggccacgcccaccagttcgcccagcggaatgtcgatgtcgatgttcttcaggttatgcacgcgcgccccgcgcacttcgatcgcctgcggccgttgatcgtcgctcatgctcggcaccgctccgccgccgcgctatctgacctctgttcaagtgtcacgccgtcacctctttctcgacttcgcccttggctgccgccgcctgagcttcatggtctccagtatcatcacggccaacgacggcggccgaacgacggacgagaatctttcgtcttgggcaccgtccgccacctgcaattcgaactagctgaaccagcgtgacgatattgtcggctatcgatctgccgtgatcgtaatggacatcgtcgtccggaagcacgtcacctgttccgagaggagtcggcggcgcgctttcataagggcacacaatcccaagatcacacccacagatcaataccgatcaatactcgtacgtgatcgcggggtcgccgatggtcggcgtctgatccagtttgaggttggccgagccggccgcggtggtcacgtcgtattcgatggtcaccgtgtcctgaggcgccagggagatgtcgtccatgtaggtcatatggtccttggcctgcacctgtgcgaaggaactgccgttcgacgccgacacgttgctgacctcgcctccggccggcgtgtagatgaccacgcggttcaccgccacgcctcccttggcgttcgccgtgatgtattccggcagggatccggcctcgcccggctgcagggtgttggtgaacgaatacgtaacgtggtaggtgttgtcgccggtcctcttcaccgtcgacttgcgctggatgtaccagtccatcttcgaggcctgcatctcgttggagtagacgccggtcaccgggttcttcgcgtcgttggtgatctcgccggtgacgccggcgctgcgcagcaccgcctgatcctcctcgtggaacgaccagaagtacaggtgccgctgctcggccatccggagcatcgtcttggcgacggtcatgagcttctgcgtgttcatgtcgctgaacaggtgggcgaccgcctgggcggcggtctcgctgaagtactggtcctgagcggagggcgtcagttccttgtaggcgccgttgagcaggaattcggcggtgttcgacccgttgagcacgcgcccgtcggacagagtcacgtcgccggtggcgccgatcatcgcctgcagcgcgacggggtcgagcgacatcacgccgtcggacgatccgccgaacggagccgcctgccagaacttctgggccatggacgcgacgcgcgggaagtccggcgtggacgaaagattatgaatgacttgaccgaagtacagtccgctgtacagcgtgccgtcaccgtcctggttgacgtcatccaacgcggcgttggaggggaactcggcatccgcgtggaactcccccaccgcgatcttgccgttgtccgcgctgaaggaaccggccgaaccgatcaggccgccggttccgcggatctcggaattcgtctgggcaagcagcacgtagttgcgggcgccgttcgcaccgaggaagttcggcagcatgttgagcatgccgctcaggttttcggtcacctgcgccagggcggccatctgcgtcttgccgttctgcagcgcgttgttcaccacgccgagtttggcgtcgggaagatcctggatcgtcctggcctgtgattgcacggactggtcgaccgtggcaagctgctgcgccgcagcgatgatcggctccatgttgagctgcccatcgccactggagaggctggcaccggtcagtgtggtgacgaccttgcccagctggggcagcgtggtctgcgcgaagtcatcgatggtaccgatggcggtgcgcgccgtcttcacgtcaccgccgaccacgggcatcttctccgccagcgtccacagaccgccgctgacatcctgcttggcggcggccgcctccttctggatgtagctcacgtcggacagcgccttgaccatgtcgtcggtggaaccgtccttgatgaccttggccgcgttaacgacattgttgaggtgcgctttggcgctcatcgccgacttgtacagtttgaatccgctgaagccggccgccgcggcgcacacgaccagcaacagcagtacgacgagcagcgcgttgcgaacgcgatgggttgtcctggtgaccgtgcgtgcgtgtgatggcatgggctacttccttacgttatgacatgtatcgatactggctagctgcccggttacgctttcgctggacgggtagcccggcggacggcacgtagcagtgcacgacgtgcacatcgcgtatgatgccgggggttgtcagcgcggctgactggggtggccgcggaccggtacctggacttgcagctgccctccggcgatgcatgtcacctgcagcggggaacgtccgctgcagttacggctattaccggccagccgacagcaatcgctggtttagttgttggtcttttccggctggtcacccgtttccatgagctggcatgcacctttcagcgagtatctctcctaccgcatgccagtctacccatgcccgcgggataacccaaaaagccttgcaagaataccgaatttctttacctttggccctgatcgttcgacggctcgcaagacggcgtaacctcatccaaccggccgatccccggaggcggaaccagcggaatcctcgtgaccggaaatgcgatcgttcccgcttgcgcgatggcggatgcgcgcaacgccaacgacgcatcgacaagccactgtatggcactctcaaaatccttgccacgtccaccagctcgcaccacgccgcatacgaacttcttgttctctttcgccaactgggaaggaattgaatcccatacctgattgagacgaagcgtggtgacggcgggactatcacgcatatcaacatgtttggagaaatcgtcacgataatcggagaccagactattctgcaatttacgaaccgccgtgaagtcaggattcggcagagtactggcgaacgcttcaacgatctccggcatgcctcctgtatacatgaaataccgcagccaagtcatgaccctgtcatgcattacgttaattagcggaaaatccttggactcaagcatttcggccaaggcatactgtttgcacgcatacaggaattcaacaaaagacataggatacagcttgagtctactgaccttgccaaccgggaatgaaaacccaggatgcatggcgatgccaagcgccaatccagtggccaagacgtcatactccggggcagcttcattgaacatcttcagcgaagtcatcgccctcggcacctcctgtacctcatcgaaaatgacgagcgtatcctcgggagtgatcctagttccggactcgatcgacagtgcgggaatcagccgttccacactcagatccgcatcaaacaacatacgcatgttggcattgtcgaaaaatgcgacacaacagcaatacgtaaggtacttgacaatctttgatggagtcgtatactcatatctgtcaggtacttgacataattactgaagaggatgaaaaagacacacgaccagcgacgtttcgctcgcttccttattaaaggagaccggcatgaacatcacacatgacatgagcaacgacctcaccgaatacgacccggaatcccgtcaagtagacggaccgaaccccatcgaaaaccgcatcagctcctccgcggcccgtgttcccgacatcatcagctgcacttccggcatcaccgtccagggccgccaactccactcgttcgcgttcaccacggacgcggccatcatccgcaacaccaatgccgacgccattctcgccgtatatccgttcaccggcgaaccagtcatcacccaggccctactcaccgcggcccaggccccgctgttcgtcggcgtgggcggtggcaccaccaccggcccgcgcgtcatccaactcgccatgatggccgagatgcagggtgcggcgggcgtggtgctcaacgcgccggcgccgccctccacggtgtacgacgtggcgcgcatcacgaacaccccggtcatcgccacggttctgacctgcgatgacgaattggacgagaaaatcgaggccggcgcctccatcatcaacgtggcggccggccgcaggacgcctgacgtggtccagcagatcaggcagcgtcacccctccatcccgctgctcgccagcggcggttcgaccgacgagtccatggccgaaaccatcgtggccggcgcgaacgcgctgacctggaccccgccgaacgcgcaggagatgcagcgctcgatgatgatgcgctatcgcggcgaatccaccggcgacaacatgcagcactgacgtaaggattccgaacatgagcagcaccagcaacaacgccgccgtaaccggaaacgacgcggtcgacgacgtaatggccacgagtcaatcggcggagaacggcacaagccacaacaccgccgacggcgatatcaagaacgatattctcagcagtttcatcagcattggccgtatcatggcgtatcgcgcgatacacagacggctcgtctcccccggcgccaaatcgccgcgcggcgaacatgctttcgacccacgccgtggccaaggccgcgtcttggccacgctcagggaatccgaccagaccagccagaaagacttggccgcaatgttcggcatgagccgccaggccatggccgaactgttgaagaaactggaggccagcggtcacatcagccgccgtccatccaggcgggacagccgcgtcatgatggtcagcctcaccaaccagggccgcaaggccgccgatctgctgggcaaagcgcccgaccagacctcctccatgctggactgcctcaatgaaaccgagctacaaaccctacacggctacctgcagcgcatcatcgacacctcctccgacgacctaccggcctcgaccgccgaggatgtcaaaaagtgtgagctgcttatcgaacacctcaagcgcaggcgaatgccggccgaccgcgcatagtttgcgaacagcccgcacgacttgtggccgcataagcatgcggccgcacaacagtccagccgcacagtcatccagccgcccctacaaacacgcccgattcaccatttgcacgacatcttgcaccaaaccctactttgaaatgcggtattttgcaccaaaaccccattttgaaatgcggcattctgcacatacaaggcagaaaatgctactcccataagggatattgattttcatcgacgaggtgcaagaggcaccggatgtaatgaccacgtcaagtttgatgtaccggcgtcgcaattcggtgatttgacgtttcaccacatctcgctgattgcgaaaaacagcaagtcgtgattcgagcgtggcatcaccttgcttagtcatatcaacaaaatccttgatctctgcgagactcatgcccgtggatttcagacattcaatgagatcaagcaattcaagatcgccgtcatcgaagcatctccgtccggaaccagttcaagcgataccgggcaaaagaccttggccgtcatagtagcgcaacgtatgttcggacagcccagtctttcgcgacacctgaccgatggaatatcccatgccaactcctttccctgcagtcgagccagtgtgagtccagccatattcacggatgtcctatgcggaacggacactcttcgactgcctgaaccttgcagcccaaacatgcatcaatcagcacaaatcacagacagtgggccatatacagcggcaacttgatgcgctctccatccacttcaagctggcggggatgcagaacgtattccttgcccaatcgttgggcataccttttgcggaatttgtcgagcgaagatacgccgtatcgtttcgtggatttcacttcaatcgggctgatgcgaggcttcatcgcggcattatcgtattcccgaacgatgaggaagtctatttccatggttttcgtggcatccgccctatccgagcgcgagaagaaatacagtttgcgcccattcgcccggaattgctgcgccaccgcattctccaccagcatcccttcgttgagcgagagtttatcgaacagaatatcccggtacacatcatccggcgttgtctctcgatcggcaaacgcctgcgacaccagcaaaccggtatccgccatatagcatttgaatgaatcgttatcttcgtacaatcccagccccaccaaagggtcagtcgaattacggcacaggttcaccaagcgggcgtcttccaaccagaagaacgccgaatcgtattcacgagatcgagcccccttatcgaccgatgccagagtgaatcgtttctcatgcttggacagctgccctggaatctgagcgaaaatgccccgcacgcggccggcatcgccattggcgaacttgccgatatcatcactgtacagctgcaggatgccacgtttaatcgaatccacctcgccaaaatcgcgctgctcgacataatcggcaaccgcctgcggcataccgcccaccagcagatattcgcgccacagcctcatcgctcgtttgtgcagcgcatcgggcaacgggaccagacgctcgaacgatttgcgaatcgtttcagcaagcagctcctcccccatggcccagcagaactcctcaaaatcgagcggccccatgtccattttccgttcctcggaggggatgacgatattcgccacattcctcttgatggagatcagcgaaccagtttccacatagtcataccggccatccgcaaccagatatttgatgagctccctcgccgccggataccgctgcacctcgtcgaaaataatcaacgattcacgctcgtacagtcgcttgcggtaatacgcagacaacagcatgaaaaatgtgtcaaagtcatcacgctggttttcgaagatgtcgcgaacgtcgcgcggcaaacgtgtgaaatcgatgagaatatatgacttgtactgagtgcggccgaattcctcgacaatggtgcttttgcccacacggcgagcgccttcgatgagaagagcctcacgcccacccgctttttgtttccatgcgatcagcttatccagcatcttgcgcttcaacatgagcaatcacctcattacacgaaaacaacagtataggcatatgctattctacacgaaaacagaagtatagagatggccgattctacacgaaaacaacggtatggaaacatgcaccgaaccggctcacccccaatctctcccccatcacaccggcggcctgttcgattgtgcggttttgtgcgaatggctcacacggttcttagtgagaaccgttctctgcgcacctgaccctagaaccggatcagcgccttgatgaccttgcgctggtccatcgcctcgtaggcgtcctggatatggtcgaggtcgtactcggcggtgaacacgcggccggggttgatctcgcccttgagcaccgcgtccagcagaccctcatcaaggtcatagtggcgcacgggagccgggccgcccttgatgccgatgttgccgtagaacgtgccttcggcgctgatctccacgtcgtgcggcaggcccacacgaccaatcacgccaccgcggcgaatcaggccaatcgccgtgtcgaaggactgcttggagcccacgcattcgagaactgcgtccgcaccatagccgccggtcatctccagcaccttgtcaatagcctcttggccacgctcgggcacgatatcagtcgcaccgaattcgcgggcgagcgccgcgcgatcctcgtgacggctcatggcaataacgcgcgtggcaccgcgcatcttggcggcaatcacaccgcacaggccaactgcgccatcgcccatgaccacggcggtgtcaccgggcttgacctcggcagaaaccgccgcgtgataaccggtggacatcacatcggaaatggtcagcagcgatgcgagctgctcatcggaataatcttccggtgaaccgggcaccttgaccacggtgccgtccgcctcgggcacacgcaggtattcggcctgacaggcggagaagtagccgccgtgcgggcacacggattcgaagccggccttgcataccgggcacttgccgcagctgtatgggaatggcacaaccacgaaatcgccgggcttgacggattcgaccgccgcgccaacctcttcgaccacaccgatggactcgtgacccacctggctgtgtgcggcctgtccgctcagcccacggaagaaccacaaatcagagccgcacacgcacgtgcgcaccacgcggatcacgatgtcatcatcctgttcaagcatcgccttcggcacttcttccacggtcatcttgccaggctccacgaaaatcgcagctttcatggtttcagacatacgttcataactccttgttttccggcatcgagcgcttaaggcccgttatcctcgtgttctattaaacaataatcgccttgcattaaccaatagccataaaccatgtttcgccatacccatgaggtatggcaacaaccgagcaattcactgcgataggccaatatccgagatacgctcactgttcgattcgtcgccatgagtaatctggagaaccggcgatggaacccgcctgaactcgtttcgaaccgcacactgctgatagttcctacacacgatttgatattgcatggaatcgttgtgtcttcagcaggattcagcggtttcaggaaaggctattatggattcgcaatccccatccgcaggtgcccggccgattacgcacacgaccactcccccggcgcgcaagctccccgatattcatcttgatattgtgttggtcgtcttctgcggcggtgcgatcggcaccgctatccgctatgcgttcgcacagattcccgcggctggcagcttccataccggcacgtttgtggccaacatgctggcttgcttctgctatgcagggttgaccgcttacttggccggcgcttcccggttcggcgcacgttccaaagaacttgccagtcgcggactcggcatgggcgtatgcggtggtttgtctacgatgtcgacactcgcgctggaaggttttaccgcaatccgcgacggtcaggtggcggccggcattgcctatctactggtgacgttcgcgctgggtctggtttgtgcgtctgccggcgtgtgggcaggaacgcatctggccggctcctcgaacgtatccgccgaagcgtccgctgatacgaatgccgctacgaccagcaagggaggtaaggcgtgatgaccgtattcctaccaatcttggtctgcctgtgcggcggcgtaggcgcctcctgccgctatctgcttgacgtgaccatcaaaacgtactggcagcgcgcattcccactttccacgttcaccatcaatctcatcgccggattcctagccggtttggtcgcggcgctggcactcggcgggacacttgatgaaccatggcggctagtgctggccaccggtttcctcggcggcttctccacgttctcgaccgcaatcaacgaaatggtgacgctcttccgcaaacaccgctaccccaccgcagcggcctatctggtgctgtcgctgggtgtgccggtcgttgctgcggcctgcggttttctcgtctgaccgccacgccgattcccgacgcggtcagcggtatcattgcgaggtcgaacgtcacaggtacatccgggaggtatatgggcatggcgaacaatggagcggatgtgaagccgaatcaaggtgtgggcgccacaaatacctcgaccacaacgaatactgcggaaaataccgtgggcacggcaaccccgaagcaaaatggactcgccgtgctgggcaagtatgtgggtgtttccgccacgcagaccattgtggagtatgcgacgttcgccattctgcacttgatcggcgtaccctcacagatcgccaacggcatcgccgtggtgtgttcggcgacctacaacttcgtgatgaaccgcaacgtgacattcaaatcgtccagcaacttcacccgttccgtggcgctgttcgtgctgctgtggatctggaacttcacgttcagcacgctgctgatcggctggatgccgggtgcgaccgggctgagtccatatgtggtgaagttcattgcgatggcctgccagttcggctggggttatccgttgtgcaagtacgtgatttttaggtgacacattccaattgctcactgtcgttcgccttcgcctatttgtatttggagcgcttatcagaagaacagcatcgcaacacctgcagcgaagcacatgagcagaatcgatgtcaggaagctggcgagcatcggcttcttgcccttggaagcgatggccttgaagttcacgttgatgccgagcgcggccatggccatgccgagcacgatgtacgcaaagtccacgagctgcggggtgatggaggtgacgaacggtacgaaggtgccgataatcgaagcgccgatgaagccgagcatgaaccacgggaaggccacggtcttcttgccggtgctctgaacctcggaatgcttcttctcccaccagatggcgatgatgatggccgcgaacacaagcatgagcacgcgggaaagcttcatgatggtggcgatgtccaccgcgccgaacgcgtcgccgcccgcgaccgcgtgggcgatttcgtgcagggaagcaccggcggtgatgcccagctggtccttggtcatgccggtcagcgggccgagcgcgatctccagcaacgcgaacacagtacccataatggctacgatggccacggccatggtcacgtcgttgtccttctcgtcctgcttgtcctcaggcaccttgatggaaccggccaggcccatgacggcggccgcaccgcagatgccggtgccaccggcggtcaggatggcgagcatcgggtcgacaccgagtttgcgggcgatggcatagcacacgatgatggtcagcgtaacgaccacagcggcgatcggcagacacttgatgccctgcgtgaacagcacggcgaggttgagcttgaaaccgagcaggatgatgccgaggcgcagcagcttgttggaaatcaggccagcggcgtccttgacgcctgccttgcggccatcattggaaccgacgtaggcactgcggatcgggaactggatgatcataccgatgagcagcgcgatgatgagcgcgccgaacaggctgaatccggggaactgcttgagccaggaggcgaacagcgaggccagcagagtcagaacaccaatgaacagcatgtcaacggtggcaatgcgcttccaccattttgtacagaactctctcatgatgtctattgaagctcaagcgtttacatcggtcaaatcattgcaaccaatacatatcatcgattttgtcgatacctaattgatctccctctgatgagagaggtggccgccgcaggcggacggagagagagaaacaacgttcgcgacctcccctcagtcgactatctgactacccgcgcagcgcagcaataatcatctccgccaactcccgctgatcgtgcgtcagaccggatctcggcaccagcgcatagaaccgccgcacaaactcatcgccaagctcccgctgcaccggcacgcccgccggcacggcggcttccgaaatcaacgactgcccgaacccggcggacagcgccgccacaatcgccgcattactggacacttccatcgtgcgtgcaggcacaacctgagcggtcttgaaatacaaatccgtgtaataccgcacgccggaaccgtgctcgcgcaccatccacacgccgtcgggctcccccgccaacaccagccggtcctcgcacagggtgacgcggtccaccgaatcgttcacgatcggcttttccaccacgccgagctgcacggccttcatgctgacccgttcgagaatcgcatccgagttcatcacgtgtacggcgaagtcgaaactgtccatgttccgagccatcaccggcaacgccttcggcagcagaatcgccgcggtcgtgtgcgagaacgaaacggccagcggctcacgcgcctcctgcacgcgggcgatctgctcacgcgtatcccgccataatccgtcgatgccgatggcagtctggtacagcatccgcccggcctgtgtgggcgtcacgtcacttttcgcattgcgcacgaacagcggcgcgccgaccatctgctccaattgggcgatacgcgacgacaccgtcgactgcgataccttcagctcatcggcggccagcgtgaactgacccacctcgtatacggcgaccagggtttcgagcagagggaacatggtttaactgtacgctgtatgatgcacgaatatttcaattagcttgggcgtagccctaggccacggacctggaccaccctcagtctcgcttcgcgagccagctcccgccagcggaagcccaatggctttcacatcactatgcctcgcgcagttttgcgagctgcgccttggccttgtggagtttggcatagatctcgttgcgctgggccgggttcttgacgcgctgatggtcacgagtgagcttgtccacttcggattcgagccgagcaatttcagtatggcgaatgatgcgcgcatccagattctcgacctccggcgtacccaaaatggtctgtgagcacagcgatgcccacagctcatcaatagtagagccggccagctccagctgggcctcccccgccggctgccagtcgccggcatatacctgatagatcggcgtgtgcccggcacgccccggtatggcgcggcgcacggcgaacgcgcattcctcacgcgtgctgccctcgaacggcacgtcgcgtacgcacacgaacacgatgcccgatttgcgctgtccggcgatcaggtcgatgacttcgttcggtatgccggtggctttggccgtaagcttcagtccgatgaccagcacttccgggatcagtttgccgtccgcaagccccgtgttggccgaccgggccaacgccagcatggtgatggattcgatctcgttcaccaatcgctgcttgagtttgccggaaatcggcgctttgcctacgaacaaggctttcggcagtgtgcctttggcttcgggaatcgccgtggaaacgggcagtcccagcgaaattgcggatacagaaccacagtgagcggcctgtgcaccagtcatcatcgaccttctttcccggcctgccatcagtgtcatatcctcgcagtgcagcagtccgtttatctattgaaaagcaacactagcgcatccaggccggaagtcgtggtacatatccatatcctgctgcggttatagaaaatcccctccgagtttcctcgaaggggatttcctataacgctagttcaagcgaagattcttgtctgatgaaaatcaggcgaggatcttggtcacacgaccggagccgacggtgtggccaccttcacgcacagcgaaggtcaggccttcctccatagcgatgggctgaatcagctcaacggtgaaggtagcgtggtcgcccggctgaaccatctcgacgccttccggcagctcgatgacgccggtgacgtcggtggtgcggaagtagaactgcggacggtagttggagaagaacggcgagtgacggccgccttcgtccttggtcagcacgtagacttcgccctcgaacttggtgtgcggggtgacggagcccggcttggccacaacctggccacgctcgacatcgtcacggccgagaccacgcagaagcagaccggtgttgtcgccagcctcgcaggcgtccatggtcttgtggaaggtctcgatggaggtgacggtggtctgctgggtcggacggataccaacgatctcgaccggggtgttgacggccagctggccacgctcgacacgaccggtgacaacggtaccacggccggagatggtgaagacgtcctcgatcggcatcaggaacggcttgtccaggtcgtgaaccggggtcgggatgtagtcgtcgacagcgtccatgaggtccttaacggactggacccacttctcgtggtccggagcgtcgtcgtgcagagcaccgtaagcggaggtgtggatgaccgggcagtcacggtcgaagccgttctcgtcgaggaggtcgcggacctcttcttcgacgagctcgatgagctcttcatcgtcgaccatgtcgcacttgttcagggcgacgaggatcttcggaacgccaacctgacgggcgagcagcacgtgctcgcgagtctgggccatcgggccgtcggtggcggccacaacgaggatagcgccatccatctgggcagcaccggtaatcatgttcttcacgaagtcggcgtggcccgggcagtcgacgtgagcgtagtgacgcttctcggtctggtactcgatgtgggcgatgttgatggtgataccgcgggcggcctcttccggagcggaatcgatctggttgaagtcgtactccgggttgacatccgggaactcctcgtgcagcaccttggagatggcggcagtcagggtagtcttaccgtggtcgacgtggccgatggtaccgatgttaacgtgcggcttagtacgctcgtacttttcctttgccattacttttgtcctcctggacgtctcgtgagtttcctgcaccctttcgcacaggaactcgcttattctactgggtttctgggttatgtgccactttgaagagccagaacccagtcagcggtatacgatattaccgctgactgaagacactggctacttcatgcagtggcgcgtgtcactcgccgcgctgggccttgatgatctcctcggagacgctcttcggcacctcgtcgtaggagtccatctccatggtgaacatggcacgaccctgggtcttggaacgcaggtcgccgatgtagccgaacatctcggacagcgggaccttggcgtcgatgaccttgacgccgacaccgtcggtcatggactggatgttgccacggcgctggttcagatcgccgatgacttcgcccatgtactcttccggcgtacggacttcgaccttcatgatcggttcgagaatgaccggcttggccttcggggcagcttccttgaagcacatggaacctgcgagcttgaaggccatttcggaggaatcgaccgggtgcatctggccgtcagtgacggtggccttgacgcccacgaccgggaagccggcgagaacaccggactccatggcctccttgacaccggcctcgatggggccgatgaattcggcggagatgtggccgccggtgaccttattctcgaactcgaaggtcttgccctcggtggtgtcgagcggctcgaagttcatcaggacctttgcgaactggccggaaccaccggtctgcttcttgtgggtgtagccctggtccatgacggccttgcggatggtctcgcggtaggcgacctgcggcttgccctggttgcactcaaccttgaactcgcggcgcatacggtcgacgatgatgtcgagctggagctcgcccatgccggcgatcagggtctggccggactcttcgtcggtcgtgacctggaaggtcggatcctcttcggccagcttggacagggcgatgcccatcttctcctggtcggccttggtcttcggttcgacggccacctggatcacaggatccgggaaggtcatggagtcgagggtgatcggatcgtcgatggcgcacagggtgtcaccggtggtcacgttcttcaggcccacgaaggtgtagatgttaccggcgtcagcgcggtccatcgggttttccttatcggcgtgcatctggaagatcttgccgatacgttccttcttctcgcgggtggagtcgagcacggagtcgcccggcacaacggagccggagtagacgcgcacgaacacgagcttgccgtagaacgggtgggtggagatcttgaagaccagagccgcgaacggatcggacttgaccgggtgacggtcgatctcgacggactcatcgccaggcttgtagcccttgatggccggcacgtcttcaggagacggcaggtaatcgacaacgccgtccagcatcggctgaacgcccttgtccttgaaggcggaaccgcagaagatcgggaaggcttccttggcgatggtgagcttacgcacgccagcgcggatgtcttccttggacaggtcgccgtcctcgaagaacttgttcatgaggtcgtcgtcggcttcggcagcggcttccacgagcttctcgtggtactcctgagccttgtccttgaggtcgtccgggatctcagtggtgtcgtacttggcgccgagctcctcggtgccgttccacacgtaagcctgcatctcaaccaggtcgacaacgccagtgaagtcgttctcggaaccgatcggcaactgcatcacgatcggagtagcgcccagcttctccttgatggtgtcgacggagtagtagaagttcgcgcccagcttgtccatcttgttgatgaagcagatacgcggaacgccgtacttgtcagcctgacgccacacggtctcggactgaggctccacgccttccttgccgtcgaacacggcaacggcaccatcgagcacacgcagggagcgctccacctcggccgtgaagtccacgtggccaggggtatcgatgatgttgatctggaacttgtccttggtgtcgtgggactgacggctccagaagcaggtggtagcagcggactggatggtgataccacgttcctgctcctgcgccatgaagtccatggtggaggcgccgtcgtgggtctcgccgatcttgtagttcttaccggtgtagaacagaatacgctcggtagtggtggtcttgccggcatcaatgtgggccatgatgccgatattgcggacgtcgtggaggtccgaaatctcttcagccatctttttccttagttttactcagggcgagtgattaccagcggtaatgagcgaaggccttgttagcctctgccatcttatgagtatcctcgcggcgcttgacagaagcaccgaggccgttggaggcatccaggatctcattggcgagacgctcagccatggtcttctcacgacgggcgcgggagaagtcggtcagccagcgcagcgacagggtgttggcgcggttcggcttgacctcgaccggcacctggtaggtggcgccaccgacacggcgggagcgaacctcgagggacggacggatgttgtccagggcgcgcttgagcacagccaccggctcctggtcggacttctccttgaccatatcgagcgcggagtagacgatgtcttcggcgatcgacttcttgccgtcaagcagaatcttgttgatgagctgcgccaccacggtggaaccgtagatcggatcgggcagcacgacgtgcttcttggaaggtcccttacgtgacatatctcttacttcgccttctttgctccatacagggaacgaccctgcttacggtccttgacaccctgggtatcgagcgcgccacgcacgatgtggtaacgcacacccgggagatccttcacacggccgccgcgcacgagcacgatggagtgctcctgcagattgtggccttcgcccggaatgtaggcggtgacttcgatgcccgaggacaggcgcacacgagcgaccttacgcagagccgagttcggcttcttcggggtggtggtgtagacacgggtgcacacgccgcgacgcagcgggctgcccttcagggccaaagtcttggacttcttcggctttgcctgacgtcccttacggacgagctgttcaatagtaggcaacttgaattctccgattcagtggtttctcttgcttttgtgtgaccgccgcactgcacccacacttttcagcacactcgcttggtatccgcctgttggcggcacccgacgaatcggaaaagatagcccagtccaccggcccgatggccttcgcccctcccgtcggcgcattactgcgtgcgatcagcggtttgaaggatatcccagcatgctcgcctgttacataaggcgtgctgttggcacacacgaatatctatattacgattcctccggacaacgacgcgccgagccacaactcactggtttggggacctcctgcgcccccgtacttttcctctcctcccaacgcaatattccaatgcgtcgcaaaacacacacccaactattctcccaacgcaatattcccgggaatgcgtcgcaaaaagggaacgccacacagcaggtgcccccgcggagactatgtcacacgggggcaccgccaaggaggttacattatgtttcttttcaccacatccgcttctgtgttatctgtttccagcacatcctcgtgctcttccatatccgatgggaacctctagcgacccggcctctttgccgtattaccttgccgctttctgcattaccaattatagcaaaaccgccctcgcgaaacgcccgatacctcaatcgggagtaagcgggagcggctatgttatgcgaggtaggaaaggtggatgaccgactgactggagtcgtgccttacccgacctttctcaccatttcaggatttcaggcagcgaccttggcggccttatcggcgtcgaacgggtgggccgctgaaacggtgctcttggcagagcccttctcgccattgtcggaatcccagtggatctcgtgcttgtcatcgtggttgcgccaccagctggacaggatagagccggagatgttgtgccacacggagaagaaggtggacggcacggcagcgagtgggttggttgcgaaggaggtcagggccagggttgcgcccagagcggagtcctgcatgccgacttcgaaggtgatggccttctgctgtgcgtagcggaagcccttcgggtagatcttgtacatcagcttggagaagccgaagcccagcgagtagccgcacaggttgtgcaggatgaccaccgggatggccaccagggagctggccacgaacagcttcggaccgttggcggcaacgaccacgccgatgataagcagaatagccacctgagaaacgataggcagggcgaccgtaaccttctcgatcttcttgccgaagatcatgtggcagatcacaccgagggcgatcgggaagagcaccaccttgacggcgttgaggaacagggactgagtcggcacggacacgtactgagaagcgagcagctgcatcagcagcggaatcatgaacggggcgcacagggtggagaggatgccgatggagacatcgagggccacgtcaccacgggacaggtagctcatcacgttggaggaggtgccagacgggcagcagccgacgagaatcacgcccacggccagcgggccggacaggtggaagatcgcgcacagggccacggcgatgagcggcatgatgatgaagtgagctacggtgccgacgatgaccatcagcggctgggtcaggatgcgcttgaagtcgtccagcgtcagggtcaggcccatgccgaacagcacgatgcccagcatgtagccggtgtacgccttgccccacaagctggcggccggcacgaagtagttgaagacggcccagacgatgacgatgaccgtaaaccacttggtcagccaatctgcaaaggctttaaccttttccatggtgtttctcttcccttgtttggtgtaggtaacatcgcatgaaactaggcgggtcgcggttgatatgaaacataatgctcacattgcgaacactcacgtaatcatttctgcaatccccggtcgtaccatcacaccgtcgtgtgccttgacttttcatcaatcgccgcacaagacccactcatccacatcccgccatctgagacagcccgcagcctggccccaagaatgaaaccgaccacttgattccatcgcgacacaccgatgagcacacatccgcaaagttgtgtatagtattcacctgttgcgcgaattcagcttgctgaatacggcactatggtggccatagctcagttggtagagcatctgattgtggttcagaaggtcgcgcgttcgagccgcgttggccaccccagtaaaacccttccgttcgcggaagggttttgttttttctccctgaattccccgctcctgggttataggccaaataggcatgccgggaaccaccgcgttgtacactcagggcatatccaattcaccgaacataaggacaaaaggtccgtcatgctgtcttttgagaacgattactcccgcgccgcccatcccgcggtgcttgaagccgtggctgaagccaacaaccatctgtattcgggctacgggtccgacgaactgagcgatcaggccaaggccaagatccgcgaggcctgcggccagccggacgcggatgtgtggttcctcgtcggcggcacgcagaccaaccaggtcgtcatcgacaccatcaccccggcgtatgcaggcgtggtcgcggtcgcctccggccatccgaacgtgcacgaggccggcgccatcgagttctccgggcacaaggtgctcacgattccccagcacaacggcaaaatggacccgaccgaactggacgagttctgcaagaccttctatgcggacggcaactacgagcacatggtgttcccgggctccgtgtacgtctcgcaaagcaccgaatatggcaccatctactccaaggccgagttgcaggccatcgccgatgtggcgcacaagtacgacatgccgctgttcgtggatggcgcgcgactcggctacgcgctgaccgccaccggttcagacatgacgctcgcggatctggcgaccatcgccgacgtgttctacatcggcggtaccaaggtgggtgccctgttcggcgaggccgtggtgtttaccaagcacaacacgccgaagcacttcttgaccctcatcaagcagcacggtgccttgctggccaagggctttgtgctgggcgcgcagtttgacgctttgttcaccgacaacctgtatttcaagatcgcccgcaacgccaatgaggcggccgatcgtattcgcgaggccctgcgcgccaagggctacacgctcactttcgaagcgcccaccaaccagattttcgtgacgatggatcagccgaccatcgaccgtctggagcgcgagatcaagctcggctttaccgaaaaggccgacgacacgcacaccgtgatgcgcatctgcaccagctgggccaccacgcctgaagaggtcgatcaacttattgagttgttgtaaaacccttcgctaatctctccctccgtcatcgcttcgcgatgccacctccctcatcagagggaggttttttcgtagatccctctgatgagggagctggccaccgcaggcggactgagggaaagacctctccgcaaacgagaaggctcctattcccctatcgccttgcgttccatatccacgaacttgtggaccgaggcttccacggaataatgcgccttggtgtattcggcgtatttctcgccccattcggcgcgctcggcctgatgtgcgatccaccaatcgatgcgtcgggccagcagggccgcgtctcgcacggggaacaacgactcgtcgatcagcgcgaactggctggccgccgacagttcggacgcggcgatcaccggcaccaatccgcacgccatcgcctcgatcacgctcaccgattcgatgtcggcaatcgaacaatgcacgaacaaatcgcccgaacgcaacaaatcgggcatatcggcgtgcttgtggaatccgatatcggccttgcgcgccagcaaacgcccggcgcggaacttgagatactgcttgagcggcccagtaccggcgatcaccagctgaatatcgccggcgtgccgggacatcgacaccgccttgatcagcgtaatctgatctttctcgctagccagtcggccggaagcgatgacgcggaacggcacgggagccgaggcatccggatcggccggcttcttcggcgaatacaccggtgaataaccattggaaatcacgtgcaacttggctttatacccgtgcgcgcgcaacaggctcgcggtcatttcggtgggcacatggatgtggtcaatgtgcttgtacagccagtgcttgaacagccagtacaggaagctggaaataccgggaatgcgacgtagagggccggccgaatacagcacgttctccggctgcaggtggaatccggcagtcacgggaatgcccatttggtgggcgactttagcggcacgacggccgaatttgaacggcatatagatatgcaccacatccacgccttgaaaggcggtgcggaacaacgtgtcgctgggttcggcgaattgcatgagctgcttggcggccacccacgagacgagcggcaccctattcacgcgcgccggatattcgggcgcccctataccgacaagcctcacatgatggccttgccgctccaattctgcagcccattgcaaggccgaattggaggtgccgttgccctgattgcccaccgtatcgaccacaagagcgatagtcagcggacgatcaatgctctcttcaatcccgttttcgcgcattgcctcatcctaaaccaccgcgctgcaatggcgtcggccgcgctgcctgaacgcgtatgaaatggtatgggctgccgcattttgcccaatattgaatcacgcgctccgcagcgcacgtcgccgaatccgagccccgcataggcgaaatcatcgcggcatggcagaatgtgggtatgactgagaacgccgtaaatactgccgtgacttccacctcctctcccgcaattcccgccgagacttccgccgtctcccccgcaactcgcgcagccaaccgcccgctgggcacaccgctgggcaagcaccccacccgcgtgctgtttttgggcgctggtgagctgggcaaggaagtggccatcgagctcatgcgactgggcgcgtgggtgtgcgccgctgactcgtatgccggcgctccggcccagcaggtggcgcatgaatatcgcgcgttggatatggcgaatgccgccgaattgcaggcattgttcgatgaaatcaagccggacatcatcgtgcccgaggtagaggccatcgccactgatgtgctggccggtactgcggccgcgggcgcccaggtggtgccgagcgccgaaatcgccgcgatttgcatggaccgcgagcgcctgcgcgtactggcccacgaagaattgggcttgccgactacaccgtatcgttttgccggctcgctggaagagctgcgcgccggagcttcggaagtcggctatccgtgcgtggtcaagccggtgatgagctcgtctggtcacggccagtcggtggtgcgttccgccgacgccatcgatgccgcttggaccgaagcgcaggagggccgccgcgccgccgatgagggcgatgtgtcgcgcgtgatcgttgaggcgcttgctccgctggagcgtgagctgacggtactgactgtttcttcgtccgccggcattgtgacgtgcgcgccgatcggccaacgtcaggagtccggcgattaccgcgagtcctggcagccggctaccgaacccgatggtgaggccgagcgggcgcgcgacatcgcacgtaccgccgttgaaggcttggtggccaaggctcaggcggccggcgaaaccggttggggcgtattcggcgtggaactgttcgtgctcaccgacggctcgattctgttcaacgaggtctccccccgtccgcacgataccggtatggtgacaatggcctcccagcgtctgagcgagttcgcgctgcacgcccgcgcgattctcggcctgccgatcacccccgagcatgtgtcgctcacgattccggccggctcggtggcggcaagccatgcgattgtggtggccggcgacggtgaggtcgagttcaccgatgtggccgctgctctggccgaacccggcacggacctgcgcatttttgccaagcccgaagtgcatggccaccgccgcatggccgtggcactggccgtcggcgagtccgaagccgacgcccgtgccaaggccggcctcgtggccgatgcgttgacgattaccgtggagtagtccacggcctgatcagctcagcatggcctcaatattattgccgtccgggtcgtggatgaacgatcatgacgaacctccttgtaccatttcgtcactcccattatcgtgtgtatatggccgaagagtcatgtttcgtctattgacgaacatctgagtattcacacgcgcttctgcagataccttcatgccggaaggctacacgaccggagacgagctgatcgtactggccaatgacggccgcctccgccatcccaacagcgtatggccgttcgatgcagcgacgtatgatgcgccggccgcatcgtagcgtcatgctgagtgttgttgtagccctcgattggtacccttttaccgttagttcacccagaaattccactcctgaaaggtgagtcatggagaagctggaaaagctctacgagggcaaggccaagcaactgtacgcaaccgacgatcccgaggttctgtgggtcgaatacaagaacaccgccaccgctggcgatggtgaaaagaaggaagacttcaccggcaagggccgtctgaacaacctcatcaccaccatcatcttcgacctgctcaagaagcgcggcatcgacagccaccttatcaagcgagtggacgacaccggccagctggtgcgcaaggtgaacatgttcccgttggagatcgtgctgcgcaacgtggccgccggccacttctgctcccgtctgggcgtggaggaaggcctgccgctcaaggagccggtacttgagtacttcctgaagaacgatgatctgcacgatccgttcgtcaacgacgatgacctggtggccctcggcgtatgcactcgcgaggatctcgccgagatcgccccgctggcccgcaagattaacgaggccctgatcgagatcttcgccaagatcgacgtcaagctggtcgacttcaagatcgaaatgggccgcgccaccgacggcacgctgctgttggccgacgagatcaccccggattcctgccgtctgtgggaccagaaggaccactccggcaaggtcgagcaccttgacaaggacctgttccgccgtggtctcggcagcatcatcccggcctacgaagagatcgaggagcgcctcgccgaactcgccaagtccgaaggcatcgaagtcgccgagtaatgcattatctggctcccctctcgaggggagccaattgtctttaatttcaagaaaggatttccatggtttttcgcgtgtacgtggaaaagaagcccggctttgatgtcgaagcccagcagcttgcgggcgaactgcgcacgatcctcggactgaccggcctcaaggccctgcgcatcgtgaaccgctatgacgtcgaaggcatctcccaggagctgttcgaccagaccgtgcccaccgtgttcagcgagcctcaggtggacaatgtggcctacgacctgcccgacttcgccggcgccaaggtcttcgccaccgagttcctgcccggccagttcgaccagcgcgccgactccgccgccgaatgcatccagctcatctcccagggcgagcgcccgaccgtccgctccgccaagctgtacgcgctggaaggcgacctgaccgacgccgacgtggacaccatcaagcattacgtgatcaacccggtcgaagcccgcgaggccagcctggagaccaaggaaaccctgaagacccaggtgccggtgcccggcaaggtcgagaccatcgccggtttcaacgagatggacgccgaagccggccagaagttcatcgacgagcgcggtctggccatggatctggccgacctcgaattctgccagaagtacttcagcgaggagagccgcgagcccaccatcaccgaaatcaaggtgatcgacacctactggtccgaccactgccgtcacaccacgttcggcaccgagctggacgaagtgaccatcgatgacgccaccgtcaaggccgccttcgagcgttacctggcgatgcgccacgagctcggccgtgacgccaagcccgtctgcctcatggacatgggcaccatcggcgccaagtggctcaagaagaacggtgtcctgaccggccttgacgagtccgaggaaatcaacgcctgcaccgtcaaggtcaaggttgacgtgaacggccacgacgaggactggctgttcctgttcaagaacgagacccacaaccaccccaccgaaatcgaaccgttcggtggcgcggccacctgcatcggcggctgcatccgcgatcctctgtccggccgctcctacgtgtatcaggcgatgcgtgtcaccggcgccgcggacccgaccgtgccggtctccgagacgctggaaggcaagctcccccagcgcaagctcgtgaccaccgccgccgccggctacagctcctacggcaaccagatcggtctggccaccggtcaggtcgacgagatctaccaccccggctacgtggccaagcgcatggaggtgggtgcggtcgtggccgccaccccggccgaccatgtgcgccgcgaaaccccggcccccggcgacaagatcatcctgctgggcggccgcaccggccgtgacggcatcggtggcgccaccggttcgtccaaggcgcataacgtggaatcgctcgaactcgacggcgccgaagtgcagaagggtaacgctccggtggagcgcaagctgcagcgtctgttccgccgcggcgatgcctgccgtctgatcaagcgctgcaacgacttcggcgcgggtggcgtgtccgtggcggtcggcgagttggccgacggcctgttcgtggacctcaacaccgtgcccaagaaatacgagggcctggacggcaccgagctggccatctccgaatcccaggagcgcatggccgtggacgtggacgccgaggacgtggacgagttcctggcctacgcccgcgaagagaacctcgaagccacggtgattgccaccgtgaccgaggacccgcgcatggtgatgacctggaacggcgacaagatcgtgaatctgtcccgtgagttcctggcctccaacggcgcttccaagcaccagaccgtgcatgtcgaggaacagcagtcctacgagaccccgtggggcgagggcacgctggccgaacgcatgaacaagctggtcaccgacatcaacgtggcctccaacaagggcctttcggagcgcttcgactccaccatcggcgcgggcaccgtgctcatgccgttcggcggcaagcgtcagctcaccccgaacatggccatggtcgccaagctgccggtgttcggcgagaccaccaccgcttcggcgatggcgtggggcttcaacccgtacatcatgtccaagaaccagttcaccggcgcctacctgtccgtggtcgagtcgctggccaagctggtcgcggccggcttcgagcatgagaaggcctacctgagcttccaggagtacttcgagaagctgcgcgacgagccggaacgctggggcaagccggcggccgccgtgctcggcgcgctgatggcccaagtggacctgggcgccggcgccatcggcggcaaggactccatgtccggttcgttcgaggatctcgacgtgccgccgacgctgatctccttcgccgtggccgtgggcaacatgaagcgcgccacctcccctgaattcaaggacgccgatcaccgtatcgtgcgcatcgcgccgcgctacctggccgacggtctgaccccggacaaggatgcgctgcttgaggtgttctccgtgatcgaggagctcaccgacttccacgatgccctggccgtctctacgccgggctatggcgccaccgccgaagccctgttcaagatgacgctcggcaaccgcatcggcgtgactctgaacgacagcatcgccgtggacgacctgttcaccccggcatatggttcgttcatcgtcgagctggcagacgatgccaagcttccggccgtctccaatttggtcgagatcggcgaaatcggcaccaccacctccgagtacgtgttcaaggccgccggcgagacgctggacctggacgctgtgcaggaagcttgggagtccggcatcgaatccgtgttcccgtaccgttccaagggcgaggacaagggcgcgaccgtcgagaccatcgacttccacgcgccgaagaagaccgtgtacgtcggctcttccgtggccaagccgcatgtggtgatcccggtgttcccgggcaacaactgcgagtatgattccgccgccgccttcgagcgcgccggcgccgacgtgaccacgctgatcgtcaacaacctgacaccggccgccgtcgccgaatccacgcaggcgttggtcgatgagatcaacaagagccagatcgtgatgatcccgggcggcttctccggcggcgacgagccggacggttccgccaagttcatcaccgcgttcttccgcgcgccggccgtcaccgaggccgtgcgtgacctgttgaagaaccgcgacggcctgatgctcggcatctgcaacggcttccaggcgctcgtcaagctgggtctggtgccgtacggcgacatcgtgccgatgaccgacgcctgcccgacgctgaccttcaacaccatcggccgccaccagagccgactggtccgcacgcgcgtggcctccgacctctccccgtggctgtccaagacttcggtcggcgacatccacaccgtggccatctcccacggcgagggccgcttcgtggcctccgacgaggtactcgcccagctcagggccaacggccagatcgccacgcagtacgtggacgagaccggcacccccggcatggacctggatgtgaacccgaacggctcgctgctcgccatcgagggcatcaccagcccggacggccgcgtgtttggcaagatgggtcactcggagcgttccggcaacggcctgtacgtcaacgtgcccggcaacaagtaccagccgatcttcgaggccggcgtggaatacttcgccgcctgataatcggcgcgtatcgcgtctgatacggcacacagggaagggactctcgggttccttccctttttgttcatgccggtcatgggctaaggttggggtgttcgcactaccgaatccgccgctgaaaggacctgtcgtcatgccgatcaacgaggcattgttcgccgcgatgaaggccgccagctacatcaagcccaacgcgggcaagtcgtacaaattgcagcgcgtggcggaagagcttatcgccaagcaggcacccgccaatccgaaatgccgtgtcgaggacgccttcgcgcctatggcggatggatatgccgtaccattgcgagtgttcacgccgctggtcgcctatggagcgcccctgcccgaagccctggaggaatcttccgccaatggcacgcccgtggcctcggcaatatccgcgattctgcccgccgtattacccaaagtcctacccaaaatactcatcaaggaaagcacgtcgagcggcaacgccgacggtatttccggcaatgccaacacggaacttccctcagtcacgccgcgtggcacgatcctgtttttccacggtggcggttggaccacaggcggcatcaacctgtacacgcaggcttgcgcgcatatggccgtacgtctgcaacgccgtgtgatctcagtcgagtaccggctggctcctgaataccgcttccctactgctgttgaggattgctatgaggtagcccggcagctgtttgctggggaattgccgatttctggggtgggtggttctgttgatgttgatcacccccagtcggctgcgccgacagcccccgccggcgggggcgatatatctgcgacaatcccagcaccggatcccgacagcatcgtgctgtttggcgacagcgcgggcggcaatcttgcggccgccgtctcgctcatggcccgcgaccgcggcgagttcatgccgcgcacgcagatgctgctttacccggtagtcggcaacgattacaatcccgagaccagcccgttcgaatcggtgcggaccaacggcaccgactacatcctcaccgcacaggacatggccgactacatcgacatgtaccgttcgtccgtggccgatctgaccaatccgtatttcgcgccgctcaccgcgcacgacctgagcaatcagccgcgcacgctggtgttgtccgccgaatactgcccgctcagagacgaggacgaagcgtacgcccgtcgcctgcaattggtgaacgacaacgtctcctgttaccgaattcacgatggcatccacggctacctgctcaatacgtcggccgtgggactggtggccaccacctaccgaatcatcgagcatttcctcgacggcacaccgctggaaccagctcccggcaccggcaccaccgccaacgcaccggagggaggcgacgcgtggcaagacgtacttggtaccgactagacaacatcggcaagttctactcctcccaggctggccgctcctcgcagaccgtgttccgctattcggccgagctggcggacggcatcgatccggacatcctgcagcacgcgctcgaccatgccatcgcccagttcccgagcttcaacgtgcacctgctcaacggcatgttctggcattacctcgaacagtcagacggccggccgctggtggagccggaacatctgccgatatgctcgcgactgcattacgggcccaaaagcatgctgttccgcgcaagctatttccgcaatcgtgtcaatctcgaggtctcgcacatcatttcggacggtcgcggcgccatcaacctgttcaagtcgctgctgcacgcctacatcgccgagcgatacgacgtgccgggcgtgccttcggattacgacggttcggatagcgacaaagccgaaaacagcttcgacaaatactacgagaaagacaaggccggcgctgcgccaggcacgaagatctaccggctggccggccccatcgaccgggccgcgcctacgttcatggaataccacgtcagcgccagcaaggtgcttggtgcagcgcatcagtgcggagtgagtctcacctcctacctcatcgccgcgatactgtgcgcgattcgcgacgtcatgccctcgcgcgcccgcaatcgcgcgattcgcgtggatattccggtcgacttgcgcgccttcttcaggtcggagaccgtgcgcaacttctacggcatgacttacgtggcgtacacgccggccgaaatcgaagccgatgaggactccgcgaaaacttccgcaacaagcccagacgcagccggcgacggccagcagtccgccgcccgcaccgcgcacggcaacggtatgggtggattgctgaccgatgagccgttggccgacatcgcccgccatgtgcaggagcagctcggccatgccaccagtcgcgagcgcgtcgaatcgcatatgaaccgcatgattgcgctggaaaagaatccggtgctgcgtcttgcgccctcccctgccaaggactgggtgctggagctggcccggttcatcgccgaccgcgagaccacgaccaccgtctcgaaccttggccgagtcaccttggacgaacgactcgcgcgccatgtacgttcggtgagcttcctcaccacaccggccagcctgaatttcacggtctgctcgttcggcgacgacctgagcatcggcatctccaccatctaccatgatctgaacgtcatcaagaacctgtgtcggattctcgccgcgcagggcatcagcggccgtatgaacatcgctggcgtgcatgtggagaaaggagcgtcggcatgaagcattgcgatgcctgcaccgtcgatttcaccggcgatatggcccgttgcccgctctgccagaacgaattgcgcggcgaggcctcccccgccgcattccccgcgcagcagatctatctgcgtccgaggcgtttggcggtggaaatcatcacgtttgtaaccggcgcgattttgctgctgcatggcttcttcagctatctgttttcgtggccgataccgattgccagtgcatcggcggccgcgctgatcatcagcgtgctgttcatcaatagtgcgattctgcacgtgccgcggccgcttcgcctcatgtttcgatatttctatatcatgctggcgattgcgctggtctggtttgtggcgacgatgaatcatgtcgtcaccatgttcgtcataccgatcacgtgtctggtttcgctggtctttgacgtggtgctgcttatcgtgctgcgggccaaggccattgacgagtacgccaagtatctggcgttcgacatcgtcgctggtctgatgcctctgacgttcattccgctcggctgggctccgtgggatgtactggtgatggtcagcgggctggtctccctgctggtgctgctcggcctgctcgtcttcgcccgccgtcagctcttctcggaattcggcaaacagttctcggcctgattgcctcgtgcgctcaatcgcccgacttaggatggaaaccatgagcgaacatgtggagcatgggtttgggccggtgtgggatggcgagtcccgggttttgattttgggatcgatgccgagtccgaaatcccgagcgacggcgtacagccgaggcgagcatccgcgagagcggcagcaggtagaggaaggtcgcggcggccaggctgagcgtgggcgcgttgatggtggcaagcggcacggcaccggcgatcgaccaaggaatcagcggagcgatcaccacggcactgtcttccaaatcgatagcttgtgcggagcgttcggattcgtcgtcgccgtacagcccaccgcacaactggtgagtgagcatgatggtgagggtctggttgcaggcgagcgccgccgcgcaagtcgcggtaatcatggtggcaccacatgcgccgatgcgatgaccgagcatctcgatgacctgctgcagccgagcaagcatccgcgtctcggcaaaaatgccggcgtaggcggaggagatacagacagtggccatcacagtgagcatggagaggatgccgccgccgtccaggagtgcggccacctgcggattttgcgcatggtaaccgaaaataagcagccgcaacagttctgcccattccatgtgctgcacgcccacgcataccgcgaccgaggcggcaatgctggcgagcataagcagccgaacatccacacgcagcaacgccaacacgatgaccagtaatgctggaactagggtaagccaatgcaaatcgaaggccgatgagaacaatccgccgatatcggttatgctgcttgcgttggttgaaacagccgctctagccgagccagccgagccagccgtagcagccgcactagccgcaccaaatccggaaccaccgctcgcgcacagccactccaccaccgcagccgcaacgtataccacacaactcagcacaaacggcaccgcacccgtgcgcagcatgcgggcaatagtattgaacaggttcgtatgcgtaagctgtttgaccagcaaggcactggtggaaaccggcgaacaacgatcgcccacatagacgcccgcaagaatcgcgccaccgagcatcaccgggttcgcctgcatcgacaatcccaacgacatgcagatggtgcccatagtcgccgcactggcgaacgacgacccgaccagcaccgacatcgccgagcacagtagaaacgacagcggaatcaccgtggcggcgtgaatcaccgcggtcgaatgggccacgatgaaggcgatggtcccgctggcccgccacagcgaggtcagtacgccgatgagcacgaaggccaccaccacggtccccgcggaccgtacgctgccggccgcacggctcgccatcgcgcgcaacgagcaccggcgaaccagcccataccccatgaacagcagcacaccaacgaacagcgcgggaataatcgaccagccgagggcgacgctggcaaacagcaccgcacagaacagcaacatcgtgcccgcttccagcatgcgatcctctcctcttccggctacagcctcatctcagattccatctcatgacccgcagtcgcaaacatcaacgctattcgcacgagccatgacctaagataacaggagaaatacagactaaactgatatctattacaggtttaatactgtggcattgattcgcgccacgacacgtcatacacacaccacgcaaacgccatacacacgggagtatcgccatgaactttctcagcatcgaatacttcgccgccgtggcctcggaacatagcttcagcaaggcggcgaaacggttggggatcacgcagcagacgctgagtgcgaacatcgccgccctagagcgggagctcggatgcacgcttttcgtacgccatgtgccgctcgaattgacctatgccggcacggtgttcgcgcgatatgcgcagcgattccgccgcgatcgcgatgcacttggccaagaaatgcgcgacatcgccggcgatcaggccggcgtgctgcgcgtgggtgttgcctacacgcgtagccgggcgatcatgccgccgattgtgaaggcgatgcaacgtgactgcccgaatatcatcgttgaactcattgagggccgcaacgatcagattcaacaatggctggcgaacggcgatcttgatctggcggtggcggacttcgccgggaaaccggccggcatcgaacttatggatttctataacgagcgcatggtgctggtcctcgcacaatcactgtggatggatttggccgctaccggtggcgcggcgaatggccaagtcgatgccgtcagaaccgcgccggacgagcgcgccattgccgcaggtgacctttcctcactggagcattgcccgtttctcctaggcagcccacaagatattgacggacgcattgccgatctgctgttccaccgtgccggttttgagccgaaagtcacagcccgttcggataacgtactgactctgctggaactgtgccattacggcatgggtgcctgcctatgcccggagcggttcctgccagcgctgcttgacggcgaacggttgcgtactttgcgcgtgctggattgcggcccggataccgcatatgccattcagttcggcgttccggccacatcgtatcggtggagcgtcattgatgatttcattcgttgcgcccgcgaagtcaccaccggcgtgtcgcaatagccgccaacttgcgttcaagtggggttgaactgtttcaataagaattgttagcgttcacggccggccatgaagagacgacggtgacgattgattatcaaggagcacacatgaagtatcgcagcgttggcaagtcgggactgaagatcagcgaggtcgcactgggcagctgggtcacggatctcaagggcacggcggctgaggacgtggccaaggagaccgtgaagctcgcctacgattccggcgtcaacttcttcgactgcgcggacgcctattctggcggcgcggccgaacgcttcctcggcaagacgctgaagcagtacccgcgtaaggaactggtcatttccagcaaggtctacttccccaccggcgaaggcgtgaacgaccgcggcctgtcccgcaagcacattttcgagagcatcgaccagacgctgaagaacatgcagaccgattatctggacatgtacttctgccaccgttttgacgagaccaccgaccttaccgagaccttgcgcgcgatgagcgacctggtcgcccaaggcaaggtgctgtactatggcgtttccgaggagtggggttcggctcgccttgaagaggcccagcgcatcatcgaccgctacaacctgtacccgatcaccgtggttcagccgcagtacaacctaaacgaccgttacatcgagcatgagatcatgggcacctgccgcaagctcggcatcggcatcaccacgttctccccgctcgcgcagggtctgctgaccggcaagtaccgcaagggccagccgctgccggccggctcgcgcgccacctggcagtccgaccaccagatcaacgatctgctgaccgatgagaacctcgacaaggtcgagcagctgcgcaaggtggccgacgagctcggcacgaacctgccggtgctttccatggcatggatcctgcagcacccggagatcagctgtgtgatcgccggcgcctccaagcccagccaactggagaacaacatgaaggccgcgggctttgtgattccggctgacgcgatggccgaaatcgacaagatcaccggcttccaccgcttcgaacgtcacgtaggctgacgaatctgagacttcctccaacgggagcgattgtcaagcgccgaaatcggtatcgccttgggcttcggcctgagcgatggcggtttcggcgttttttgctgtttgctcgatgacttggttgtagccggtcagggccgcgaacggcatgaactgcgcggcccgctggtggcgggacatgtgcggatgcttgcgcgactgatggtgtggcaggttgatgatgtcgtcgtatgcatgggtctcttgcagggtcatgcgcgatggcctccgatctgacggttgcggtcctgaccggtggcgccgtcttccatatccatggctttgatgacggcgttgcggccgaatttacgtttcacatccagcagcgcacgctggatatcatgctctccatctttttcgctggtggaatcggatccatacgattgggccccgtcatcaccgaacaagtcgagctgttcatagcgtttgccggcggccagctcctccggagtggccacatcatcggcgatgacggtcaaccgcctcacaagcaagcgtgaatccacaatgcgctcgtacaacatcgtcatggcctcacgaatacgtgccgacgacgaggtgaaatcacccaaaccaatcgacccgaccgcgctcttgggcaccttgcgcccaaatcggtcgatggtcaccggcccttgatagcttttcgccgcccgctcagcggcacgtttcatcgcataatcagcgcacgaatcgagctttgacgaatcaagactgccgatgtcatagccgacggcgagcgtcagtcggttcgtcagcacgcttttatcgaccagatcgagggccagcgcatcagccatctccttggtgatcagccgggccgtggcatagtcggcggggccggtgagcacctgcccactgctaatgctgtgcgcacctggctcataggatcggatatccgcgatttcgcacggctcccagccccacgcatggtcgatgagcagttcggcattgacaccgaacatgcgatacagcaggtcttcgttgtagtaatccgaagcacgacccaccgagcatcgggcgatatcgcccatggtcatcagtccggcatgctcgagcttcttggcatagccgcgcccaacccgccaaaaatcggtgagcggacgatgatcccaaagcagccgacgatatgacatttcattcagttcggccacgcgcacgccgtccttgtcggcgggcatgtgcttggcgacgatatccatggcgactttggccagatacatgttggagccgatgccggcagtggcggtgatgccggttttggtgaggatttcgcgcacgatggttcgcgccatcgcatgcggccccatacccagcgagcgcagatatggcgtggcgtcgatgaacacctcgtcaatcgagtagacatggatgtgctcgggtgcggcgtatttgaggtagatgccatatatttgcccgctgatttccagatagtgcgccatgcgcggcttggcgatgaccatcgaggctttgagccccggcgagcgttccaggtcgcacgcatcacaggactccccgattaatcggccgccgggagcatggaccgcgcgctcgatgttgactccattcaggcgctgttttacctcaaacagccgcgcacggccaggaatgccatagttcttcagcgagggtgagaccgccaaacatattgtcttatcggtgcgggtttcatcggccaccaccagatgcgtggtcaacgggtcgagtccgcgcgccacgcactccaccgaggcatagaaggacttgagatcaatggcaatataggtatgctcgcgttgcgtcgataccgttccgctgcccatcgccatcacctccttaccaccgctggcccgaccagcatatcaacacagtcgaacatttgttcgatgcaacatgcctgttcgaaactgccgaagtcgacgcacgcaacgcgcccaagcacgctcttcacccacgccacacgcgcagcggcggagcagcggcatgcatgcgtaccatggggaatatgaagaaaagcattacagcagacagcgattttgcagcgtgggcggcagcccgatcccagaagacgaatcgatcactggcaggagcccgactcgcgattccggagccacagaagcatgccgaaatcaagtctcaggcccagcaatggggcatgaccgtcgaagatgccacgatgaccgacgagcacaacgaggaattcctatgcgacggcacacaaagcatcgattccatcaccgatatgcgcaaggcaagcggactggaggcaatggagtacgcggaacagcacatgccggtattacgcgacaccatggatagcctcaccactcgcgtcgatttctcaggcattcgtattgccgtctgtctgatactggagccaaaaaccgcgattctgctgcgcaagcttaaggccgccggcgcaatcgtcggcgtatattgcggcccggattccacggatccccgagtggcggaacagctgcgccgggaaggaatcacggtcgaatccagccgagactggaccgcggagcaggcgcacgaggcggccctgcacctgctggacgaaatacagccggacatcatcatcgacgatggtgccagcttcgcccgtctcgcttcgctcgaacgccccgaactcacggcgaacctcattggagtggccgaggaaacgaccagcggcgtacgcgcgttccagcagatgcaggaagcgggagccctcacctacccggtcgtagccgttaacgacagtgtgctgaaaaccggattcgacaacgcccacggcactggggagacatgcgtgaccaccatgcagcgcattctcggcgagcatgcattcgacggtaagaacgtcaccgtcatcggctacggcccggtcggccaaggcttcgcacggcgcattcgcgcgcttggcgccgaagtcaccatctgcgatatcgatccagtggcttcactcaaagcggtgttcgacggcttcgccgcacaagacattgacgaggcactcccctgcgcggatatggtggtgtccgccactggcgtgagacatacggtcacacttgagcacatgcgcgcaatgcacgagggcgcggcgctcgcagtgatcggcggcatcgccaacgaaatcgccttggacgaggtaagcgacttcaccccacaggtcaacagggacaccgtgcaactcaatgttcccgacggaccaacgctcacgctaatcgccgacggcgatggcgtgaactacacggtgggaggcggcaatccaatcgagatcatggatctgagcttcgccgtacaggccagcgccgtcgcatatcttctggaacatcgaggcacactggatcacacgcttatcagacttgacgcagcgaccgaccagcgcatcgccgccagcgcgctcaaggcgcgcggataccgagccagccatgccgtggaggacaacggctacaattggcgactgaccagattcgcggaaaacgaccgagagaacgccgaccgatagccatagacacggcaccgaacacaacgcagcgaggagaatatgaccgacaacacctggccgaccgtcgataccgagcttatcgatgatgtgacactgtattccgccaaactcatcatccccgtgacgggccccgtcatcatcgatggcgcagttgccatacatggcgaccgcgtggttcatgtaggtaaacgccgctgggtgctgaaggcgctgaagcaggaaatgacggctcacggcaccatccatgaacggcattgggatggggtgctcacccccggattgatcaacgcgcacactcatctgcagtacagcggcatggtgcaggtcgggcaaggcacctacgatcggttccgcgcctgggaactggcattcaacgaggtgtacgccgaggcgcagaagacccagccatggaagcagtgggccgaggacggcgctcgccagatggtcgaatcgggaacgacggccgccgcagacatcgtcaccgatttggacgccgccggcgcgctggcttcgcagggcatgcacggcatcgcttattgggaggtaatgggctggcacaacgccgaatggatggaaaagggccgcactgagctcatccggcagttgcgccggatgaacgaggagcagctgccaaacctcggcatcagcccgcatgctccgtatacgctggagtccgaaccgttcgttgatcttccagacattgctcgtcagctgaacatgcgactgcatatccatctggcggagaccccgctcgaggccggcacttatccgccggtgctcaccacttattcggcggccgactggagtgaccacgattgggaaagctaccggcagctcaaggaagtgggcaaaggcgcctccgccatccagttcgtcgatcagcttggctcgcttggaccggatgtgcacattgcacacggcgtgtgggccaatggcgaggatcggcgtattctacgtcagcgcggcgtgggcgtggccttgtgcccccgatcgaatcgcattaccaacaccggcaaagatgcaccggtgcgcgaatacctcgaggaaggcaatctggtaagcgtgggcaccgattcgctctccagcacgccgaccctcgatctgcttgatgatgtgtcgatgctttacgacctggcccgcgaacaaggctatgccagcgacgatctgacacatcgcctgattcgtatgatgacgctgggcggcgccgcctccatgggcatgcacgtgggccgcaaccgcattggacaaatcaacgcgggcgcattggctgatttcgcgttcttcgacatccccgtcgacacatcatctccggccggcatcgaagaaacgctggaaacactggtgaggcacggcgcaggcacgaaccgagccacggtgatatccgggcgcgaagcctacaacaacgcctggtgacaccgctgacctgacctgatatcaagaagccaaaaaccagcaaacccgccaagaacaggagatctcattatgagcgtcgctttgcaagacatgagtccatacgcccggtccatagtggaacgccttggactggaaacccaccccgaaggcggctggtacacgcgtgactggcaatccccgcacacggatgaggcctcaagccgaccgctatcgtcactgatttacttcctgctgcccgagggagatgccagcgcctggcataaggtcgatgcggatgaggtctggctgtggcatggcccggcatcggtcaaactggagctcggcggcagcgacgagactccggaatccgacgaatccaagcgaaccgtaatcaccttgggttccggcatcaccaccgatcaggccgacgtaaccgtatcgggacatgcggtcgtaccggctggcgtctggcagcgcacagtgccaggacagggcgatgcgctggtctcctgtgtggtcagtccgggattcgtattcgacggcttcacactcgaacagtgaacgccatttcgctctgcgccaatatgagatatccgtccgcttacgcgccagattgcgcggctctagtcggccataagcaatggcgatagccagcatccgaaaatatcgatgttttgtaacccaatagccatacaattggcgcgaatgcatcaagcacggtttgaaccgtgtgcatgacgaacacttgaggagaggaaacccatgttcaataagcgacacatcgtccgtaccattgcggccaccgtcagcatcctggctctgtcgttcaccgcagcctgcggttccggccagtccaccgcatccaattccaccgattcggacgacatcacccagcagacgtacaagccgggcaagctgaccatcgccaccggacagccggcctacgagccgtgggttatgaacgacaagccggaaagcggtgagggctacgaggcggccgtcgcctacgcagtggccgacaagctcggtttcaagaagagcgacgtggtgtggacccgcaccgcattcgacaccgccatcgctcccggcgccaaggactgggatttcaacatccagcagttcggcatcaccgacgagcgcaagaaggccgttgacttctcgtccagctactacaacgacagccagtccgtcgtggtcaagaaagacagcaagttcgccaacgccaccaaggtatccgatctgaaggatgcgaccgtgggcgtcatggtcggcacccttgcctacgactacgccaaggcgaacatcaaggacgacatccagacgttcaatgatgatgccgcactggctcaggcacttgacgccggtcagatcgacgcactggtcaccagcaccgtggaatgcgtgtacatggtgcagtccgagcaggtcaaggacgccaaggtgctcggccgtctgcctgactccgaagacaagagcggcatgggcatcgtgctgccgaaggattccaagctgactgcagccgtgaccaaggcagtggatgacctgaacgccgacggcaccatcaagaagcttcaggacaagtggctggccgagtacaccaccgacctgaccgaactgaagaagtaagtgaagtaggcttacatcataaggtcacaacaccttggccgggcgctgcgggaattttcctgtggcacccggccatcccggcattcaggaagcgagcgacattcatcacatgaccgcagcaccaaccgaaaccaggcagcacaatgcccctgacggacacgaggtaagtcaggtcgagctcgaacgacgccaatatcgtgttcatcagcaaattcaatcgacgattaccagtctgatcagcaccattgtgttcgtggtggtcatcgtcatcggcttgaagctctcccccggctggccacgagtcaaggagaccttcttctccggcgaatacttcgtcaaatcgtttccccatgtgcttgacggcctatggctcaacatccgcgttctgctcgtcgcagtggtcggcgtggcgattctgagcacgctgatcgcgctggtgcgcaccagccgctcccctattctgttcccgctgcgtatcctggcattgatctacacgactgtgatgcgcggcgtgcctattatcgtcgtgctgtatctaatcggtttcggcattcccggcctaggcttgttcggccgtatcgatccctcggtactcggcaccattgcagtggtaatgggatacagcgcctacgtctccgaggtgctgcgtgccggttttaacgacgtacatccttctcagcgagcctcggcccgctcgttgggcctgacctccggccagacgacccgactgatcgtcattcctcaggcattgcgcaaagtggcgcccgcactgatgaatgacttcatctccatgcaaaaggacgtcggcctgatttccgtgctgggtgcggtggatgccgtgcgcgccgcacagatcgacgtggccagcacctacaacttcacgccgtatgtggtcgccagcctgctgttcatcctgatgagcgtgccgttcatcctgctgaacgactggtacacggaacgtctgcgtaagcgcgaactcagcggaggaacggtatgagcgaaatgaccaatatcaccaccgaggcgagtgactcccccgtgagcaacaagacggtgctgcgtcttgatgacgtgcgcaaatcctttggaaacacgcaggtgctgcgtggcatttcctttgacattcaccaacatgaggtggtggctttgctggggccttccggttcaggcaaatccacattgatgaaatgcgtcaacctgcttgaacaggtcgatgacggccagatttggctgggcaataccgatatcaccgacccgcgtgccgaccaggacaagattcgcgcacgtatcggcgtggtgttccagcagttcaacctcttcccccacatgtcggtgctcaggaacgtgacccttgccgcaatcaaggttcaccactggagcaaggatcgcgccgaaacccgcgctatggaactgcttgaacgcatcggcatgcgcgataaagccagtgcctaccccgatcagctctctggcggccagcagcagcgcgtggcgattgcgcgcgcactgatgaccgacccggaactgctgctgcttgacgagatcacatccgctcttgatccgatgctggtcggcgaagtgctcaacatggttgccgagttaaaggcccaaggcaccacaatcctcatggccacgcacgaaatgagcttcgcccacgaagcggccgaccgcatcgtactgctccgtcacggcgtcatcgccgagaacggcacacccgctgaggtgatggacgagtcgcaggatcccgagaccatcgagttcttcagccatttcaggcactgagacgaagccgaaaaacaagcaccggattcatacgacgaaaggctccgacggataataccgtcggagcctttcaaattgcgttgacgaaagtcaaccgatcacgtcacaccgacaattcggtatcacgcttgagcacaaagtggagcaccaggtaatgcggcggtgaacaggtaagaggtatccatgcttccaacctacccgtcggcatcaccccacaccacaaccacccaccacaaacagcgaaaggccaaaatcctaagccactattcatacttgactgatctggtgcttaaaccgcgtccgcaaaccccaacaagttccaccaccccacaacacgcgatgtagccgccgattggtagggttgatagatagttaatcccctgtttgaaaaaggagctttggcttgtcggctgaactcgaagacattcacgaggaatgtggcatcttcggcgtatggggccaccccgacgcctcacgactcacctattttggcctgcacgcgctgcagcatcgcggtcaggaaggtgccggcatcgtctccaacgataacggtcatctcatcggtcatcgcggactcggcctgctcacccaggtgttcggcgatgagcgcgaaatcgaacgactgaagggcaattgcgccatcggccacgtgcgttacgcaacggccggctcgggcaccacggacaacatccagccgttcatcttccgcttccatgacggcgacgtggctctgtgccataacggcaacctgacgaactgcccgtcactgcgccgcaagcttgaagacgaaggcgccatcttccattcgaactccgacaccgaagtgctgatgcacttgattcgccgttcgatgcagcgcacctttatggacaagctcaaggaagcgctcaacacggtgcatggcggtttcgcctacctgctgatgaccgaagacgccatgatcggcgcactcgacccgaacggcttccgcccgctctccctcggcaagatgaagaacggcgcctacgtgctcgcctccgaaacctgcgcactggatgtcgtcggcgccgagctggtgcgtaacattcgcccgggtgaaatcgtggtggtcaacgatcacggctacaagatcgtgcagtacaccaacaacacgcagctggccatctgctcgatggagtacatctacttcgcccgcccggattccgatatctatggcgtcaacgtgcactccgcccgcaagcgcatgggcgcacgtctcgccgccgaatccccggtggaggccgatatggttatcggcgtgccgaactcctcattgtccgccgcatccggctatgcggaagcagcaggcctgcccaacgaaatgggtctaatcaaaaaccagtatgtggcccgcaccttcattcagcccacgcaagaactgcgcgagcagggtgtgcgtatgaagctctctgctgtgcgcagcgtggttaaaggcaagcgcgttatcgttatcgatgattccatcgtgcgcggcaccacgtccaagcgcatcgtgcagctgctcaaggaagccggcgccgctgaagtgcatatgcgcatcagctccccgccgctgaagtacccctgcttctatggcatcgatatctccaccaccaaggaactcatcgcagccaagatgagcgtggaggaaatccgtgaatacatcggcgcggattccttggcctacctttcgctcgacggtctggtcgaatccatcggactgaacgccgacgccccatacggtggcctgtgcgtcgcctacttcaacggcgactaccccactgcgctcgacgactacgaggccgacttcctgaagtccctcacgcccgaggaccgtgtgcgtctgcctgaattcgcgctgtacaagagcaagtacatcggcaacgagtacaacaccgtgcagccggacgccgaatagctcaccaccaatccgctcaataacaattctttgaaccagaggcgcttgcctcccctcagtcggctttgccgacagctcccctccagaggggagccaaaataagtagaaaggccaaccaaatgccaaaagcatatgagaacgccggcgtgagcgtcgaagccgggtacgaagtcgtcaagcgcatcaagtcgcacgtggcccgcacgaaccgccccggcgtggtcggcggcatcggcggcttcggcggcctgttcgatctggcctccttgggctacaaggagccggttctcatctccggcaccgacggcgtgggcaccaagctcatggtcgccaagctggccaacaagcacgacaccatcggcatcgactgcgtggccatgtgcgtcaacgacatcgccgcccagggcgccgagccgttgttcttccttgactacatcgcctgcggcaagaacgacccggcactgcttgagcaggtcgtggccggtgtggccgacggctgtgtacaggccggttccgcgctggtcggcggcgaaaccgccgaaatgccgggcatgtacgacgaagacgaatacgatctcgccggattctcggtcggcgttgccgaaaagtccgccatcgtggacggttccaccatcgctgaaggcgacgtgctcatcggcctgccctccaccggcgtacactccaatggcttctccctggtgcgcaaggccctgttcgagcaggccggctacaccgtggacaccgaactcgacgagctgggcggcgaaaagctcggcgacgtgctgctcacccccaccaagatctatgtcaaggccctctctcccctgttcaaggcgggcgtggtcaagggcgtggcccacatcaccggcggcggcttcatcgagaacatcccgcgcatgattccggacggcttggccgccgaaatcgagctcggcacctggcctgtgctcccgatcttcgacgtgctggagaaggccggcaacatcgatcataaggagatgtacaacatcttcaacatgggcatcggcatggtgctggccatcgaccccgctcgcaaggacgaggcgctgaagctgctcgccgacaacaacgagcccgcctacgtgctcggctccatcaccgccgacaccaccggcacgcaaatcgtactgaagtaactcgctttccgcaggaaaggaacaacatgggtcagaaagtattggttatcggctccggcgcgcgcgagcacaccattgcctacacgctgctcaaggcaccgagcatcgacgaagtcaccgtggctcccggcaacccgggcatgctcaaggacggtatccacaccacgcagctgagccagtcgaatcacgccgcacttatcgaattcgtgaagaacaatggttatgactgggtgttcgtaggcccggaagtcccgctgatcgaaggcatcgtggacgatttcgccgccgccggcatcaaggcgttcggcccgtccaaggccgccgcccagattgaaggctccaaggacttcgccaagcagctcatggaccgacacaacatcccgaccgcccaatacaagaccttcagcgatctcgagatggcgcaggactacgtacacgagcacggtgccccgattgtcatcaaggccgacggtctggcggcaggcaagggcgtgaccgtggccatggacgagcacaccgcccagcgtgcgcttgaagacatcttcatcgaccatcgcttcggctccgccggtgccaaggtcgttatcgaggacttcctggacggccaggaattctccctgatgagctttgtcaacggcaccgatttctggccgatgcccatctcccaggatcacaagcgcgcccacgatggcgacgagggtccgaacaccggtggcatgggtgcctacagcccggtgccgcagattccgcagtccgtggtcgacgaggccatcgagaaaatcgtgcgccccaccgtcgaaggcatggccgaggaaggtacgccattcaccggcatcctgtacgccggtctgatcgccaccgccgacggcccgaaggtcatcgaattcaacgcccgcttcggcgacccggaaaccgaagtcgtgctcccgaagctcacctccgacctcggtgccggcatctccgccattctcgacggcgaaacccccgaattcacctgggatgagtccaacgccaccctcggcgtggtcatcgcctccaacggctacccggagaacgtcatcaagggtgcccgtgtgcccgaaatcgaagtcgacgaggattcgcacgtctactacgccggcgtcgcctctgacgagcacggtaaccttgtggccaactctggccgcgtgctgctcgtcgaaacctccgctccggacatcaagtccgcccaggacaaggtctacgcaatcatcgacaagctcgagctgcgcggactgttttaccgccacgacatcggcttcaaagccctgaagtaacagaagcggcgcatctgctgcatatttttggcctggcagacatgtcaatcgattgacgtggctaccgggccagatttttctgtcccggtagccgatttcggctctttttcgcaaaccaggacagctgaacccctcgaatataggaatatttgaaattcccctccatacgaaaccgcactattccgccattttcgtaatacgcggacgatacttccggcgtcagttttgtcccggtaagcaaaaatgacccgaaatcaaatactaggacagaaaaatctggcccggtacacgaatcaatcgattgacgtaattaccgggacagcgaacgtcactatgacaacgccatcacccaatatcagcgagcgatatcacgctagctgaatttggcgatgatgtcgaacagtttggcctcggcttcattgaagggcgggtacacgaggcgcagagtgtcggggaactgcggcttggtaaccacggttttgacgtggctgaaggtgaggaagcctgctttgccgtggtaggtgccgatgccggacgcgcccacgccaccgaacggcaaccggctggacagcagatggcccaacggcagcgaatatcccaaggctccggagctggtctgacgttcgaaagtcagccgaacctcgtgatcgcgcgagaacacatatgcagccaacggccgggaccgcttgttgatgaatcggattgcggactcggcatcctcgaccaccagaatcggcagaatcggcccgaaaatctcctccttcattactggcgcatctggcgacgtaccgtacagcacggtaggcgcgatataccgggcggcacgatcgaccttgccgccgcaaacgattcgaccggccaggtcgaacacgccgggcaccttgtgaatctcgctcggctcaacagcggccgaggcagtcgcaccatcatcagcggctgccatattcgaaccggccgtcggcttcgccgcattgttcgcgctgccggccatctcccccgcgccaccgcgcccagtagtcacggcattgaagcgccgcccaaccatatccatggccgcgcctaccgccgatgccacctgcaccagcggcgagctcggctcctcaggcggcacggtgccgaccggcaatagcttgcacagtcgttcaaaatgacgatcgttgataatacgaccaaaatcaggcgaggccttcggatcttcgccatagaattcggtgatggctacggcgatgcgctcggccagagcctcggccacatccggcgtggcgagcacatagtcgggtgccacgcaagtctgcccggcattggtgaatttgccccacgcaatgcggcgtgcagccacattgatgtccgcagtgcgatccacaaagcatggcgacttgccgccgagttccagcgtgaccggtgtcaggtgctcggccgccgcacgcatgacgattttgccgacgtgcccgccgccggtatagaagatatggttgaacggattcttcagcaaatcaccggtttccttaggcccgccctcgaccacgcgcacggcctcggggtcaaggtattgcggcacaagttcggcgatgaggcgcgaggtgttgggcgaaagctcggagggcttcaggcagatggcgttgcctgcggcgagcgcgtcggccatgggctccagcgccagcagcaccggataattccacggtgaaatgatgagcaccacgcctttgggctcggcaatcgtccatccggcagccggctgcaacatccaatgcatcgctttgggatgccgggcggtccaaaggctcagacgattgcgcacgaactgtgcttcaccagccaccaggttcagttccatgagcacggtttcagccgcgggcttgcccaagtcagccatagccgaggagacaaaggcatcacggttctccgtaaccagacggcgtagtgcgttcagctgcgcgcggcgccatgccagcggccgggtacgaccggattcgtaagtcttcttcagttgttcgaaagtctggttcgtcatgaaagcaccccctgctttacggcagcgctactgcaattttggacgggctacgccccgcgccttgctggctcgtctgtcggctcgcacgctgcctacagacagcctactaggctgtctgctttacggcagcgtcataaagtccgtgtctttgaggtagtttttgccggcggtgatgtcgtattggatgagcttgtagtcggcaagcaactgcttggtttccttgtcgaagtcatcggtggacatcgggttgccgttctgatcaagatagatgttctggccttcggggatacgatcccagccttggatcttgttgaccacaggcggttccatggcggcgatcttggaatgcatttcggtcaggaacgccagatacgggctgaccttggcgttcatgtgatcggcggcctgcgccacgaagaagttcggcgaggagtaggctgcatcacttgtcttattgccttgggagctggaagccttattcgaccagatgaagtaatcggtcaggtgcagggccaaggagttgttgtcatcctcgctggcggacgagtagatgcccggcaagtggtcaccatagaacaccacggtgacgggcttatccagcgcatccagttcattcaggaactcctgagtggcctgatcggtaatctccacacccttttgataggtctcaatcgactgctgttcatcatcacccagcggcgtacccgtggtggattcggcggtgtagtcgttattctcataccactcgtggtagggcatgtgattctgcatggtaatgatctgaatgaacttgttcgtcttgccggacttgatgccttccaacgcagaatcataggaagacttatcagagacgtacggcgactcgtcgatcttgtcctgatacttgatcacgtccggaccggtcaacgtgtagaagtgcgagaagccgaacttcttgtagttcgtggcacgcgagtacatgctggattcgtacgggtggtagccgagcgagttgacgggcgcgccccacagctggttgatggtgggagtccaatgctggctcgggaccagctgctggtacgggctggacagggaggactcgaaattggccatgctcaggccggaaagtcccatgtattcgagattggccgtacctccgccgtagccggaggagagcatcaggccggaggtggtgcccgccttgatcttgcggatgttgggcatcgaatccttattggtcttcagtcccggcacgcggctcgggtcagagaaggattcggacaacacgtacaccactgtcgaatcagtgaggttgttggtgcgggaggcgttgattgtctccgcttccttctgatagcgagcggcgaccttcttcatggtctcctcggagtagttgctcggcttgtccatgatcttcgggttgagctggcgggtgaaggccacgagcggaccattgcgctgcgcgtcatacacggaatcccacatggatggcgtgtctcccaaggcgcgggagaacttgttggccagcgaatcggtggtgctcacatgaatgcagtacaacgcgaacaccagaatcggcagcagcagaagaatcagacgggaggtgaggttcaggctcaggttatccgtacgaatcatgcgacctttgcgcccatcgaaatgacgcagcaccagaatcagcgcgagcagtacggcgaacgcgccgagtgccacgaggatggtcacatgcgcaccggccggaatgaaggtgagcatgttgccggtgttcgagccaaggaagcctagatcggcgggcagaatggcctcgtaacggatctcgaccttgaaatgttcgatggcggccacgatgattccgaccgcgagaatcacgatgcttgccgtccagaaccggttgaacagcatcagcaacatgaggtacagcaacgcgacaagtatcacgttgagcacgaatacgaaattgccgtcggtccacatcttgctcacgaagccgaatccgacggtcggactggacagctgcacacgggtggagctggacgaaacgcccacttcgagcgccgtcacgacaatgatgtcgaagataacgaagagcacgccgtacacccagccggggaagggcttgtgggggtgttggggcgtgacttcattggcttcgacctttttggcccaaagcttgaaatggggtttcactgtggtggtattactagtgttctcgctcattcgcctgtttccgtatgtgacttttcaagggcatattgttgccgctgaaccttggaaaatccatagttccactatttttcttaccgtttcctaactattcaccctaacgcaaagggtgcctcgggacatccccgaagcaccctgatatataaggagcctatccctgatagcgaagtgttctgttctcccctagacaacgcctcgctatctgacttgattattccccttatcgctgttgcggattgacggctactgccgcattacttcacggcggcggcgaactggtcgaccagtgcgctcatccagtcgagcaggttggtgtactgcttcggcatctgctcggcgagctccacgatcggcacgttggcgtccttggcggcaccggtgatctggtcagtagtggagtttgcttcctggctgttgaagacgaacatcttgatgaagccggccttcagggtgtcctggaagtccttgatgtcggccggggtcggctcgctctcgttggcggaggcctgggcgtagcccttcggagtggcgtcggtcatcttgaggtcgtcggccaggtaccaggccacggattcggtggcggcgtacggcaggccctcggtcttggcggaagtctccttgatcttggactcaagctggtcttccttggcgtgccattctttgttgagcttggcgtagtcgtccttgtggctcgggtcggccttctggtaggcggcggtgatggcgtcggcggtgttggaacgcaccttggcggagaaccagacgtgcgggttgtcgccttccttgatgccggcggtttcggcggcggtgaccagcgtggccttggtcggctgggcggccttggtggcccacgggtcgtaatcggcgccgttgactacggctaccttggcggtgccgaacttggcgacatcctggctggtgggctcgtaatcgtgcgcctcgacgttggtcttggtcatgatgttggtgacttcgacgttgctgccgccgaggtcttcggccacggaaccccactggttgatggaggcgacgacctcgatcttgccggaagacgcggcgccgctggaatcggacttgccgctggcggcgttgctggaaccgcaggcggccatcgagagcagggtcgccgcggcggccgcgatggcgagcgcgcgcttggcgttggacatgatggacatgattgggttttcctctctaattagccgaacggctgggcgatgctgctgttgctgcatcatcgcccagccaccaacacgacagaataacatgtattgagaattattatcatttgcatttacatcggcgtgtcatgctggcgttccaccctgccatcaccctggcggcgttcctgctggcctgggcgagcaccgtggtaccggcctgggtagcggccaaacgcaagctgcgtgacaagccggcttccctacttcgggcatttcatgttcatgacttcgggtggctataagcacgtgttcggcgagcagcaccagtcgaacgcctatatggtgcggctcaagaaccacgagacctccaatgtggagtcgcgcagcgccaagctcatgaagctggacggcgtgaaaggcatcgtgcagaacacgacctcaaagaaacagcatgctcggcgcgctgaagtcagtggaatagcagcggaataacaaatgggatcggctttgaagccgatcccatttgttattcgctcactgctttctgagccttctgcgctttctgctccttttggcaatcagagcacagtccgaagacctccaaggtgtgggattcaacggtgaagccgtggccgtcggccactttgcgcagccaagcctcgctgggcgggtcgatttccacggttttgccgcaccgcctgcacaccaagtggtggtgatgtccgtcgtcgccgcataggcggaacagctgctggccgtccaggcggatcgtgtcggcggcaccggcatcggccaaggcgttgagctggcggtatacggtggccaagccgattttcgagccttcgtcctccagcctgcggtgcaggtcctgagcggagatgaactcctcacagtcggccaaggcggcgcgaatcgcgtccttctgcttggtctggcgttcgatatgttcaaccatcggtaaggtcacgccttctttttcaggtcgtcccagcagccggtggcctcaaggtcagcgaccgtcttggccgggtcgtcggtgagcacggtgatgtggcccatcttgcggtcgtggcgcacttcggccttgccgtagtcgtgcacattccactccgggtgggtggcgatcagcgcgcgcgtcggttccacatgctggccaagtacgttgaccatcacggccggcgagagcagcttgggcttgggcaggggccagccggcgatgccgcggatgtgggcgtcgaactggtccatcgagcaggcctcgatggtgtagtggccggagttgtgcgggcgcggggcgagctcgttgacgatgacctgatcgtccttggtgatgaacagttcgatagccagcgtgccagccagttcgaagcccttggccaggcgaatcgccagttcatgcgcttcgcgagccacatgttcggacacctcggcgggggcgatggtcatatgcaggatgttgttgcggtgctcgttacgcacaatcgggaaggtgacgaagtccttgccgttgccggagaccagaatcgaagcctcgaatgcgaagtcgacgaagccttccaggatgctcggcgggaagccaccaccacggtcggagcgggagcggatcttctccaagtcggcgtcggaacgcagcacgagctgaccgtggccgtcgtagccgccggacacggtcttcagcacggccggataatgaatatcacccaatgcggcgtcaagctcatcgaagttgttgacagcgcgccacggtgcggtggcggtgccgtggtcgttgatgaactgcttctcgcgcacgcggtgctgggtcacgcgcagcaagtcggtgccctgcggggtggcggtgatgccgcgcacctcgtcgatggcgccggcgtccacgttctcgaactcgtaggtgagcacgtcggactgcacggccagatcatggatggcggttttgtcatcgtactcggcggtgatctggaagtcggccacctgaccggtcgggcagttcggcgttgggtcaagcacgccgacgcggaagcccatgtagcgggcggacagagccatcatgcggccgagctggccgccgccgatgatgccgatggtcgagcccggcatcagcatggagacgcggccgcccgtttcttcagacaagctgggcattggattcggccaccttttccttcagttcgttacggtaatcctcaagcttgtcggccagttccggctcgaaggcggagagcatctgcacggcgagcaggccggcgttggtggcaccggagttgccgacggcggtggtggccaccgggatgccgccaggcatctgcacgatggacagcagcgaatcccagccggacagggcgtgggagcgcacgggcacgccgattacgggcagcgtggtctgcgcggcgatcatgcccggcaggtgggcggcaccgccggcaccggcgataatggccttcaggccattggcgcgggcattgtgcgcgaactcggccatgagctcgggcgtgcggtgcgcggaaatgacctgcttgtggtagacgacaccgaactggtcgagaatatcgcaggcacgcttcatggtctcccagtcgctggaggatcccatgaccaccgcgacttcgggcttggattcatttgccattatcatttactccctagttattgagaataaggcccactgtactcctgatagcggagttaagccacgcagcgaatcgttctcaatacataattctgtgaggcttacagctcaataacgatcttgccgaacacgtcaccggcaatcatcttggcgaaggcctcgggcgcggcgtccagcccgctgaccacggagtcgatcgccggatgcagattggcgtgctccacgaagcgcagcaatcgtgcgaaatcctcgcgcgaacccatggtgcagccctgcacacggatgtcctggaagaacagtcgcgtgagctccgcaccaggctggtcgccggtggtggcgccgcagatggcgatggtgccgccggggcgcacggatttcatcgaatggctccaagtagccgcgcccacggattcgatcaccgcatcgaccttgcgcggcaggcgggcaccgatctccagcgcggcgctcgcgccaagtttcagcgccttggagcgcttgtccgcgtcgcgcgaggtgacgaacacctccagaccggcggcatgggcgagctggatggccgcagtggacacgccgccgcccgcgccctgaatgagcacggagtcgcccggcttgatgccggcggcatcgaacaacagcgagtaggcggtcagccagctggtgccgagtgcggccgcctcagccgtggtgaggcttgcgggcttggcgaacacgttggcggacggcacggaagtcttctcggccatcgtgccggggtatttctcggagaggatcgtgcggcgctcgcccggggccacgcccgcgccatcggtgccgacgaacgtgtacagcaccacttcgctgccggccttgagcccatgcttgccggggatgtcctcgtccagaatgcccacggcatcggtgcccaggatcatcggcgtctgttcggcggcgagacccacaccctgtagcgaccagacgtcgtgatggtttacggtcaccgcgcgcaccgaaacggtcgaccagaacgggcgggcctggggttcgggctgctcgcccactgccaacgcggcaagcggatcggcatggttgacggtggatgcgtatacggccttcattgcgcgctccttggtatcaaaaggaattaccgcattcattgtcccacatcgcgcagcgaacgaatcacccatttacggagatgttgggggcattgcttcgtcatgtggacctcggacaatgccgggcgttagcattcaacttcggaaagactagcgaagggagattcgagggtatgcgcagcgcgtcaggaaacggatttgattcaagcgattccttcgccgtctccggcgctgccgaggggaccgcgcgccttcacgacatacccccgagcattaccccttcccacggcgacgactcccatctgctgagccgcattgccagcccggccgatgtcaaggcccttgcccccaacgagctcgccgaactctgccgtgagattcgcgccacgctgctggcatatggccaccaacacggcggtcatatcggctccaatctgggcatggtggaggccacggtggccctgcaccgcgtattcgattcgccgcgtgaccgcatcgtgttcgatgtatcccaccaaagctacgtgcataaaatgctcacgggccgcgccgccgcctatctggacccggaccgtttcagcgaggtgaccggcttcaccaatccgggcgaaagcaaacacgaccagttcgtgctcggtcacaccggtacctcgatttcattggcttgcggtttggcgaaaacccgcgatatggaaggcccgaacaacagcatcggcaatgtgatcgccgtgatcggcgatggttcgctgagttcgggcgtggcgtttgaaggactgaacaacgcggctgagcagggcggcaatctcatcattgtgttcaacgacaatgagatgtcgattgccggcgatttcggtggcatgtacggtccgctcgcccgcctgcgcgcgtccggcggcaccgcccagccgaatctgttcaacgcgtttggcttggattatcggtatgtggaggccggcaacgatgtttccgcgctggtcgcagctttcgaggaagtgcgcgatatcgatcatccggtggtggtccatattcatacgctgaagggcgcgggatatgacggtgaggagactcacgcagatcggcaaaccgcctcggcctcaccggtttcgttcgactcccccaccggcgtgcatcccaccgataacgtgaaccacagcgagccgtggcattcggatcactgcaacctgtccgatcatgaaccgcatgagggccagtgcgaggcctcgcattggcagaatccggatgccgcaatcggcaagccggacgatccgcgcaagcattacggcaaaatggcgatggccgcactcgaaccgcgtttcgccgccgagccgggactcgtggtcatctcccccgccacgccgggctcgaacggcatcacccatgagttccgagagcgcgcgggcgcacattatgtagacacgggcatcaccgaatcgcatgccgtggcgtacgctgccggcatcgcacgggcgggtggcacgccggtggtggccaccacggcgtccttcttccagcgcgcctacgaccagttcttccaggagatgagcctgaaccgttcgcgagtcacggtacttgattttctgggcggcttgtccggttcggacaatacgcattccggcgcatatgacgtgacgatgttctccaatattccaggggttacgatgctggtgccgacttcggctcgcgactatctggctgatctggcatgggctaccgcgccggccggttcggcggacgcccctgctggtccggcggtgattcgggtgccgggcgaggcgattctggcggcggagcgggatgcgacgctgctgccggtgacgggtgggcagatcgctgaccgcccccagtcagcttcgctgccagcctccgccagctccgccagcgggggcatatctgccgcaacagtccacgggaccgttagcgtaacggctcagcatgccggtgcgcgtcacatgctggattggcgggtcaatcagacgggctcgcaagtcgcgatcatcggactgggcaatgcgtatccgttggcggagcagacggccgccgcattgtctgacgattatggcatcacggcaacggttatcgacccgcgccagtgcacgtcgctggattcagacgtactggagtcgttgcgtgatggccaccagcaggtcatcacccttgaagacgggcagcttgaaggcggctggggcgagaaagtgaccgcatactatgcgaatcatcatgtctcggacggcagccgtaatcctcgtgtgctgaacttcggcgcagccaaggaatttaccgaccgcgtgtcgctgggcgaactgaacgaacgttatggactaacggtggagcaggtgacagaggcgatcactcgttgtttttgatggcgtctagggccgggattttaacggctttattggccgggccgaagccgaatagcaagccgatcagcgtggaaaacagcacggcgaacaggaacagccaccacggaatcaccgaataacgggtcacattctcgccaccaactatcgcctgccagagtatggtccagatagatgttccgccaccggtaccgtcgccggagcccccgccggcaccgctgaccataccgccagacatgccgccgctcatgccgcccgcatacaacgcgccgacaacgttgatgcccagcgatatcagtccgctcagcacgcagccgatcgatccgccgaagaatccgatcgcgccggcctccgcaagaaacatgacgcgaatgtcacgaacgtagcagccaagcgccttcataatgccgatctcgcgcgtgcgctcggttacggacataaccattgtgttggcgatgccgatggccgcaaccaacagcgaaaccgcaccgataccgcccagaatcagctgaatcgcgcgcgactgttcttccaacgacttacgcatgtcttcataggaggaggtctcgtagcccaacgctttgatctgtgattcgacttcgggcacggacttgaggtcggcggccttgaccagcacttgatcataggcggtggcttttttggcggcggctggatcgactttggcggccagttccttcaacgcctgcaaatccatgaccagaccgtcggaggtggcatagcccttgttgtagtcgcccgccacaatgccggaagccagcacatcgagggtgacgttttccgactgacccgcggcgctgccgcttgcgccgcccgcgccgccaccgccgcccgcgccgcctgtgccgccgccaccgccgccgtacatgttcatgctgtactggtcgccctgataattggtgccggtggtcagactaatttgcgtggcgagcggatcgaagaacggatcctcgtcctgatcttcctcgcactggccggtggcctggtcaaacgtgcatgaggaatactgaccgccgcgtgtgctggtgcgttgttcgccgttcttcagggtgtccatgaacccataggcgaaccattcgccggcaagcacctgatcctttttgaccggcttctcgccaccgacgagcttgtagcccatctggtcgaactgggtcatgtcgatgcccatgatctgcacgtaatcatagatgtaacggccgcccgcgccggctctggccgtcacgttataagggaagttcatcatcggcgtcacgccggatacgccgctcatcgcgcggaaggattccacggccttgtcgtcgagcttggtatcgcccatctcggacgaaccgccaccgcccatcggaccggcataaccgttggtgtacacggtgacgatggacagatcgcccatcgatttaagcatcttctcgttctgctcgttaatgccctggcccaaagagaccatgagcacaatcgagcagcagccgacgataacgcccagcacggtcagaatcgtacgggatttacgccgccataggttttgtctgcaaagccgcagtatgtcgccgaatcgcatggtcgggcctttcaggccttgtgggacgggccggccggtgaggctggtgaggctggtgcaataggagcggtgtctgccgcagcaccatccgtcacgccggtatcggtcttatcatccttgccttcggaccaatcatcccagtcctcatcaatatcgttcttcttggccttctgcttgcgccggcgacgcacgagcagcacaatcaccacgataatgaccacggcgatcacgacgatgaccacatacaccagcaccggcaatccctgattggcgctctggtccatgttcggatcggccatgtcggaatcatccaccggctgcatatcggttacgggtatggcgagcgggaattccttggttttggtctgcccgtcggaatcctcgtacgtgactttgagcgtggtcttcagctcgcctgacgcgtgcggtgtgaaggcgtaaccaatcgtgccggtggtgccggaagccacattgcccacgtactgggttttcatcgtggcatcgaaaccttcgccctccatcgtggcctcgacgttggcgatatcgcctttgcccttgttcacatattccatcgtgaccgtgttttcctgaccggcgatcacctggtcgggcactacgggatcactgatttcgaaccggtcaggctgactgatcggcacggaaatcttgacatcggactggcttgaggagcgggcgctggcgtccacatactcgtatcggaagttcacggtcacgggctgggcaccgcttttcgcggaggcgagcgcctgcatcggcacgctttgcgtcatggcgtaaccgccccacagcgcgtcgacgtagaacgtgttcgtgcctcccgcgatggcgaagctctcgccgccgtccacggtgatgaccatgttcgtcaccgccacctgacccatgttctggaaggtgaagtcgaggttgaaatcggcgccggcggccacggaatcgccgccataggtgaagttggtgacgatgatgttcggcaccgggccggcgatcggcgcggaatcgccgtcgcttccctgagacgtactgttcgtgccgcttgtgccgtctgtgccgtcgactgcgtacgcctggtgcggaagggagatgacggcaagtgccagtgacagcgtggagagcaacgcgacgatgatggcgatggtgcggtgggagaggtgcttcatcggtcaactccttgggttctttgggcggacggcgtggacggaacagttgggcgggaaaggtcggtgttgagccgatcgctggtgatgcggccatcgagcaaggtgacaatgcggtcggcgtatgaagccatctgcggatcgtgtgtgaccagcacgatggtctggttgaagtcatgggcgaatgcgcagatcatcgtcatgacctcggttttggttttagagtcaaggttgccggtcggctcatcggcgaacaccacctcgggcttggtcacaaacgcccgggcgatgccgacgcgctgctgttggcctcccgacatctggcgcgggtaatggctgagacgatggccgagcccgactcgtttgagtacgccacgcgccgcacgttcgcgctgttccttgggcacgccgcggaacatcagcggcattgccacgttttcgagcgcggtcagattgggcagcaggttgtacgactggaatacgaagccaagatgcttctggcggaaggccgccagctcacgctcgtcgagtttgctgacgggtacgccgccgattctcacgccgccgcgcgtcggtttttccatgccggccaactggttgagcagcgtggatttgccggagccggattcgccgaaaatgcagcagatctggccttgcgggatactgagattgacacggtcaagcgccaccaccgtctcatcctcgacggggtattccttgcgtaggtttcttacctcgatgattgctcgtggcacgggccttcttccctcgttcgtcgccattggcggacgcgcgatagctggttattattcagcacatctcaagtcagagtatagccgttatgcaggagacgcaccccttaagggtgttcccggatggtggtgatgagcatgtgacttctaatctcaaggtcgacagttcaggctccagacggacccagaccggcataatattcaaaagcccctgcccctcacaaacgatgagggaccaagggcttattacatcgtgaccccggacgggctcgaaccgtcgaccttgagattagaagtcacatgctctatccagctgagctacggggccaaactcgtgtaagtctagccgtaggggtgtaaaacacctcggcgtaacgtcggcttgcaccggtaccatcggcgatatggggacaacggagagcaacgtagatcacgccgcatcgggccagaccgtcgcaggcgatagcggtgagctcactttcacatacgcacaggatcgttttgccagtgaaggcaaggattgggaaagcccggttgtgaccaacatggctgcatccgtctctgccgatgccggtaatgtccccgccggcagcatcaccaacaccggcaccaacaacaccttcaccagcaccaccgaatcgtcgcttgccaccctgctgtccaaccaatgcccgttcgttatcaaggccaccattttcgagggcaatggcaaaaacgccattcgcgaacgtcacacattcaccggctcggtgctgcgccagctcgaccaagccagcgccctgctgaacggcatcaacgaatccggccaatacccggccatagccctgcgcgaagcattggtcaacgcactggaacatcgcgattacacgtactccggccccacactgatcaatatcttcgattcccgcttggaaatcgtgtcgctcggcggcctgaccgatggtttggaaatcaacgatctactcaacggcgtatgccagccacgcaccccgcgtttggctgaattgttcgccgatttgggcctctgcgagaactgcggtaccggcattcaacgcattatggacgcctacgcgcagagcgcggtcagtccgcaactgcgcgtgggccccacttcggtggcaatggtactgcctatccctgtatcggccgaggccgcgtcctcgcatcggaccgatgccgatgcttccgccgcgcccagcaccactgacgaagcacagcatgccaaaatgtactcattccccacgattcagcgcatgacggataacgccgcagatgctttggccggcgcacgcatcatcggctgcgcgccactgcagacgctgattctcggcagtggattcggcgaacgcccggacggtgacgatcaggccagtacccgcccgcttgatacggcaacgctggaaccgtcgcctcaaacgttggaacagttcacgctcaatttcctcgcgttccgcggtgtgaagctcagccgtaaaaccatgcagaaagcgcttggcctgaacaaggatcagatgacgcagctcttggaccagctggagttgagcggcaagatcgaacgtcatacgcacgccaagtccactacgtattcgctggcacatgcctcaggacggtagcgaccagggcgacaacgaccaaatcgtcaacaacccaagcagcaacgaccagagcaatacggcccaaggcgcgataaagcagcagctcagttctcgaatacgcggtcgcgaatcatgcgaccggattcgtcgagcgcggtggagaaccggccatagtcggacagaatcacgcccatgtacagcatgtccacgagcgcggtatcggccacgcgcgagaaaatcgcattgccatagatcgtgtgcgaatcacgacccgtcagcaacgtcacgtcggcccagctggccagcggcgcgccgatggcattggttatggcgatggttttcgcgccatgcgacttcgccaatcgcaacgctttgaccgtatccgccgaactgcccgaatgggagaaggcgacggccacagcgccgtggggcaggtgcccggcaccgatctgctgcaggtaagcgtcggtattgagacggcatgtcagtcccaggtagccgagcttggtgaacagatccatcgccggtgtcaacgaattctccacgccgaaaatgtcgatgaactccgattcggcgagtagggcgaccgccttgcgataggccttggggtccaacgcactgtgcagctcgtcgatcagcgccttcgcgccatcggccgctttaccgggaatctcatcttcgccatcccacggattcagatcgaatccggccagcggattgaaggtcactttgtgttcggcggccgggttgcgcaacacgtaccgcagttcacggtaaccgccgaagccgagcttgcgggcgaaccgaatcaccgtcggctggctgacgtgggcgatgtcggccatctgaccgacggtcaggtcggccgcctcctcgatatgattccgaatatactgggccacggcgcgctccgccggacgcagcgacggatacacgtggtcgatgcgctcacgtattcccaccgaggattgcacagccgcgctcctagtcgtccgtattttccattcctgtttcgaggttaccggctgtataccggcgaacagtcgacttggattgaccgcaacatgaacggtgagcgaactcttccgtttacctttccgctccattccctctacaatcgaaaccatggtgcggattagcgtgggaagccccacccatcacacaagcgggcgactgtacggcgtgttcttcgaggacatcaaccatggtgcggatggcgggctgaacgccaacatggtgaacaactacagttttgacggcgtttatctcgaccatcacacgtggcgtatggccggtgccgaacggtggcgtacgcaggccgattccctgcgtttctgggatttcatcaactgttccgccgccggccttggcagtgagatacgcgggattcacggccagcgggtgaccaccgactgccccgccccgccaattcacgcacatagccgatacgctcgcatcacgtccgatgttccttccgaaaccggccctgcatatctggaaaacctcggctataacggaggcggcgacaacgggggcgagcccgcgttctccatcgtcgccgaccacacctattccgtcagtctcgcggtacgtccggttcatgggcgggccgagctgtccgtcggcgtggtcgataggtacggcctgccgctcaccagtatcactcgattgtcgtatatcgtggactccgatccgcttgacgatacggaagagaccggtctgaggcaggacgatggggccgatgcgcaggattccggcgtttcgatcagtccggattcgtcggatggtgccatcgtcatcggccgtgacggctggtaccggttcaacgccgacgtaaccggactgaacaccgattacggcaagctgcgtatcaccattgacgccggcgaacgcaccacgttcgatctggatctggtgcagttcatggatgcggactattggggcgcgggcgacccgaaatggcgttacggcaagctgcgccgcgatttggtggagaccattcaggcgttgcatccagcgtttctgcgattccccggcggctgcatcgtcgaaggtgtgacgcccggcaatgagtatcgctggaaggataccgtcggctctctggccgcgcgacgccaacagtattcgatgtggtcgttcaagatgccggatggttccagctattcgcagagctatcagatcggtttctacgaatatttctgcctgtgcgaggacctcaaggccaagccgctgcctactctgttcgccggcatcgcatgccagtcgcccggccgagatccgcgccacatggatatcaattcggccaccttccgcaacaatgtgattcaggactacctggacctcatcgaattcgcgaatggcgatccggagtccagctcgtgggccgcggtccggcgtgatatgggccatcctgagccgttcggcttggacatgatcggcgtgggcaacgaaaacttcggggctgactacgtggccaagtttgacatgatcagcgaggccattcatgaacgatacccggatatgctgtgtgtgatgagcgccggactgttccccttccagccggcgatgaagcgcagctgggaccatgcgcgagcgttggccgcaaccgattccggggcacatgattccgccaccggtgacgcgattatcgtcgacgagcattcctaccactcccccgaatggtttgcatcccaggcgtcacgattcgacgcttacccgcgttgtggcgccggcgtctatttcggcgaatattcagccaacggctattttgccggccaaccacagaccgaacaaggcgcgaacacgtggaagtcggcactcggcgaggccgcgttcctgaccggctgcgagcgcaattccgacgtggtgcgcatgacctcctatgcgccgctgctcgcgcatattccggctaaggggtgggcgcagaatcttatcgaattcaatccggcgcatgtgaaccccacggtgaattatgaggtggagcggctgttttccacgcatctgggcgacacgacgtatgccgtgtccatcgagcagaccgcgtcacgccccgccaaacatctgtatgtcagcgccaccgggcatgacagggatgacgcctgccgttacatcaaaatcgtcaatatctccgattccccggtggatgtgacgttggaaatcgcgcgcggactggccgggctgggcgcctcgccatcgcgaccggtgcgtttggaggtgacgacgttaagcgccaatccgacggcgaagaccactatcggataccgcggcgaggcttcgggggcgattgtgccggaacgtcgggcttacacattgccgtcgccgtcttcattgctggcgatgaagatcaagccgtacagcgtcacgctggtggtttcgcgctgattggcatcggccattaggccgatgcctttgccgttagaatcaccctcaaggatgagggggaatcgtgcagattcagggaataataggggctatcccccatagcgaatacaagcgcaggagggcaggatggaatccacggcggccagaagaccgccggccaacgatgaaggagtatgcggtatgtttatcaatctgttccgcaggcagcgccctgcgctcgcccggctggcccgcaactccaacgcctatcgtcagccgatggttgcggccgtatcatcgtccgcagtcggcgtatccagcatcacctctgcagccaacacagccaacacagacggcgtatccggcgtatccacgctggatgccaccatcggccgcatccacgacatcccgcagtcggccatgagccgactgaccggctcccccaccgtatacgcgcggtagaccggcccaacccacaacggcggctcagagactcggctcgatgatccagctcaaggtcagcaatacggccaaaaacagaacgttgacggcggagtagacggccagataccggcctttcttgtgcgggtattggcgcacgacgttcttgtaagaaataagcgaggccatcgaggcgatgagcgtacccatgccgcccaaattggtgccaatgatcagatcgcgccattggtcgcagaagccggaaagcagaatcgtggtgggcacattgctgatgacctggctggagccgaccgccacctccagcggatggccgccgaccagcgagcgcgccagttcgtagaattcgggcacgcgcttcatgttgccgatgaagatgaagaacatgcagaaggtgagcggcagtccccaatccacgtatttgaatacgcgccgatcggtgaacaggaacacgacgaccacgatcacgcacatcacccacaggggaatcacgtcggagacggccagtaggcagacgatgaacagcagcgagtagacgatggtgcgccagccgccataaccggcgccgtagccggtgatacgaatctcgtcgggctggtgtttgttgcgctcgggagccagcacgccggtttcgaggtcgcccaggtcgccgaccggtttgccgccaaacaccacggaaatcacgatgaccagcaacacggccgccgtgccggaatacggtgccatgatgccgaggaattccatggtcggcatgccggtcagggctttgagatacaggttgtgcgcgttgccgatcggggtgagcatactgcccacgttcgcgccaatggtcatcagcgtgaccacgaggatggtcttatcctcttgcccagccatgatgagcacggccaccgcgaacggcacaaacgtgaccagcgcaacgtcattggtgatgaacatcgcggaaaagaacgtcaaagcgacaagcgtaatgaccagtccgcgcatggtgctgaccttctccagcaatcgcgaaccgatgatgcggaacacgccgatacgctggaatccgcacaccacaatcatcaggcagatgagctggctgatggtgctggcgtgaatgtagcttttgtaatcggcgtccggcggcacaatgaaacacgaaatcagggcgagtattgcggcgacgatgagaatcgtctcatttttggctacattgatcagccagcgtcgcatccattcctccgtgaataacccaatatcgcaaccattctattttacgcgcagaccagcataaggtacgtagtcgcgttgcgctggcggacatgagtttttggaccggtgccgcacatcagccgcgctcgtttttttatttggacaaggaaacattgagtttgcatgtcttccatacaatgaactgccgcgcaatgctgtgcccgtatatacggctgcatcattgtgtggcaggccagacacgaataccgtacgtggctggctcataccaatggaacatagtttcattcgaggaagaggagcgatgaagttgcgtattaccccagtattcccggtcaaacgtttcgccgccgtgtctgcacagaacgtaaagaacgtgcagttcgattacacgaacatgcccacgtacaacacgatcaccaagtagcgcacactgccgcaccgatcggcggcactcgccgcatacatgaatggccggtgtgctgcggattccttaccaagaatccgcagcacaccggccattcatgttatatgccgcaatacagggggcaatcagccctgcaccttaccgccttgcgcgctacggtatccgaagttcatcatctcgctgttgtaggcgaccacgccacggccgaccgccggcagaacgatcatgccaccatcgccatgatgcgcggcgacttcgtccaaagtggccgtcgcggcatcttcgacgttctcgccggcgaaacgcacacgatccgacacctgatgggcggcgaccaccttgatgaatgcctcgccgatgccggtgcaggacaccgccaccgtggactggttggcgaacgtgccgcaaccgggcagcggcgaatcgcctacacgaccgtgcatctggttggtgatgccgccagtggacgtgccggcggcgatattgccttcggcatcgcgcgccacggcgccgatggtgccatgcttctcccactcatcgccaccggactgagcctcggccaaggactgacgacgctgttcggtgatgaagtactcgttgctttcggtcgcgacgccccaatcggcgatttctgcatcggtcgggtccgcgaacagcacatgcttggtctgctctttgacggcacgcgccgcatcgatcgggttcttcacggtgcttacgccggtgaccgcaccgacctcgccatcgccggtcatcaggcaggcgtccatctgggcgatgccatcgctggtcagggcggcaccacggccggcgttgaattcgggagcgtcttccatgacgtggatggcggcgaccacagcctcatgcgccggtgctccggattccaacaactggtatccggcatcgagggcgcgctgcagatcaagttcgacctgggcgatgcgttcaggcgtgctgtgcttgccacgactgcccgctccggcgtgaatgataagcgtgatgccggtttcgctgcccgccagttcagtggtcaccggcgaaacggaggatgtggtcatatcgtgtccctttctgaagtcagatggatgtgctgacgccaacgtatcgttgcttccacatgtatgatacccgttgatggccgcgaccggttccgcatttcgcatcatcggctcgcgatggcgcgactcgttactgcgccacctcgccactacgccaggggcaatgcgatgccggctcgatcgaccagatcacgcaacgaccacgtggtctgtcccgttcgcccgacaacgctatgcgcatgccacagcgaactgatgatggcttcctcgcttatttattcgtcgaatgcactcatcgatgtgggtatgtagccatcaaaaaaaactcgacaaccgcaatgagccagtcacttgactacatctgtgctatcgtctcgccaatgattcgaatgccggtatcaatgtcagcagcatccgggcgcacaaagttgagacgaatatgggaatcatccatttcgtcaacgtcgaacacgctgcccggcatgaacgtaacgccttgggaacggcaggattccaatacatccagagagcgcacgccgtccggcaaagaaacccaaatatagtagccacctgcaggcatggtccaatacacttcatccggcgcatactgctccaatgctgcgattgctgcatctcgtcgaatgcggtaagccttaatcaaaccgcgcaaatgttcggcgatgcggccttctttaagcagttccaggcagatgcgctgcgatgacgtgctcgtatgctggtcgaccatgcgccgcagagccgccagccggttgatcacatgcggatcggccacaacccatcccgtgcgcaggcccgaagtgacggttttcgagaacgtcgacaaatacatcacgtatcccgcattctccatgcctttaagcggtatggggcgatgcgcgtcggacgattccccgccgtaccacaaatcgccgtaagcatcgtcttccacgatcagacactgatagcgccgcgccacgtcaatgagttcgctgcgtcgttcgggcgacagcgtggtaccggtagggttttggaacgtcgggacggtgtaaatgagcttgggccggaatcgcgcgcaatacccatccaacaggtctgtacgcataccgtgctcgtccactggaacgccgatgatgcgcgcatccgccgaacggaaggtctgcaatgccgggaagaacgtggattgttcgaccagcacgcagtcgccggggttgatgaacgcgcgcacgatgaggtcaatgccctgctcggagccggagagcaccatcacgttgcggacgccgcattgtacgcctcgtgcgcgcatatgttcggcaagcagcgcacgcaactcttcgaatccctcgataggtgattccggttggccgtcgaattcccgcgattcgaacgcctcgatgctcaccttgcgcagcagatcgtccgggatatccgccgggttcggcgaaccggtggcgaagtcaataatggtgtcgccgcgctgcgcccgctcggccgaggcgatgtcatggtaggtaaaccggttggaataatcagagaacaacaccgaccatggcggacgcacgacggttggttccgggccctgaaccgaacggctttcacgaatcgtatggaccgccgcagagctgctgccctggtctgtcgtcaagaaatcagtggaggtagcacgttctacgtcgccggaagaggaggcttgcgatgttcccatttctgccgacgatcgtgttgttcgcgttattgcattcccgaagtcactgtttgacgtgtgcgatgttcggcttgcggaggcagccggcagcacgaacgtgcctttgccgactttggaggcgataagaccttcgtccttgagctgctgatacgcctgcaacaccgtggtgcgattgacttcgagacgtgaggacagctcgcgttcgggaggcaggcggtagccctcggccatcgcgccggagacgatctgttcacgcagctcggcggccagctgccggtacatcggcaccttgctgcgtcgattcagctcaagctgcatggcagatcgtctccttgattcgtcaatcggataccagtctaacggcagacgaatcgactacagcgacaggaagagctcgtggatgcgggtatcgtccgtgagttccgggtggaaggcggtggccaggatattgccttgacgcaagcccaccacgtggccatcgacttcggtttcgaccgtggcttcgggtccgaccgacaccacgtacggtccgcggatgaataccagtgggaagtccgtgatacgctgcggatcatccgctgcaccaaaatcggcagtagcctggaaactaccgagctgacgaccataggcgttgcggcgtacgacggcgtcgagcgcgccaaagtagacgttgtcgtcattgtcgagctttttagccagcagaatcatgccggcgcaagtgccaaacaccggtttgcctgccttgatgtgggcggcgatcggctcgaacagtccggtcgaatgcaggagcttgccctgtgtagtggattcgccgccgggcagaatcacgcggtcgatggattcatcgaaatcctcggctgcgcgcagcagtttccacggcgcaccgagcttgtccagcaccgccgcatgttcggcgaatgcgccttgtacggccaggatgccggtcacgccgtgcttggcgtttttggcgtccgcggattcttctttggaaatatattcaacagctacaaccatgttgtctccttgggccttgactcccgctggcgggagcgtcaccctttcctggctcccctcaaagaggggagccaaggtaatgcactcactcgccgcgagcggccatgatggtctgaatctcgtcctcattgatgccgaccatggcttcgccgaggttttcggacagcttggcgagcagatcggcgtcctgccagttggcggtagccttgacgatggcggcggcgcgcttggccgggtcgccggacttgaagatgccggagcccacgaacacgccttcggcaccaagctccatcatcagggcggcgtcggccggggtggccacgccaccggcggcgaagttcacgacgggcagacggccgttgtcgtgcacgtacttggccagatcgtagggcacggccagctgcttggcggcctcgtagacctcgtcgtcgcgcaggccgacgagttcgcgaatctgcttgttcatggtgcgcatgtggcgcacggcctgaatcacgtcgccggtgccgggctcgcccttggtacgaatcatggcagcaccctcggcgatgcggcgcagtgcctcgcccaggttcttcgcgccgcacacgaacggcacgtcgaactggttcttgtcgatgtggtacacgtcgtcggccggggaaagcacttcggattcgtcgatgtagtcgatttcgatggcctgcagaatgcgggcctcggcgatgtggccgatacgcaccttggccatgaccggaatggagacagcttcctgaatgcccttgatcatggccggatcgctcatacgggagacgccgccggcggcacgaatgtcagcggggatgcgctccagcgccatcaccgcgcatgcgccggcatcctgcgcgattttcgcctgttcgggcgtggtgacgtccatgatcacgccacccttgagcatctgggccagattacggttgagttccgcacgattctgcgtcatgagtttcccttcgtttcgacgctgcttggtatcgcgcttcattattgaacggattggattggcccacccaaaccagtccaatttggatggggccaatccgcaacttctgcacccatccaatccggcaaccggttgtatggacttatgcatccggcacgtattcgaggatgcgcgcaatcagtgggggggtattagccgatggtgttgccgtagatttgggcttggaggtctttgcgggcggtttccatgcgggcgatttggccgaggagggttatcttctcttcgccgtcgggcagttgggccatgcggcgtttggccaaaccgatctggcgcatgaagcccatgtccaacaatcgggtgagaagctcagtggcgtagcgctgctcctccggcgtggcaggacgcagctgtactgcggcggcaccgccattcacgccaacacctcctcccgacacgttggcctgcaccggctgcgcaccgttgccactgtcgtcgccaggcagaggcagaggcatgacagccagctcgttgatcacctgattgagcatcggcccgccggccttggtgaggttgtgcatccacagcccctgcggggtatcgtcggatggcagtccgccggcggccgcgatcgcctggaacagggtgcggaacaccgaagtcatgaaatggtcgatggtcagctgcccgaacatggtgcggtcgatggcgcgcggcacctgaatcagcacggccatgaactgctgctcggcgatgaatacggcgtcgtcgatcttgaaatatgcctgttcggcggcgtcacggcgctccaaggccttgcgcgtggccggattggcgtatgggttggtgccgggttccacacgcggctcgtcacgctcgaatcgacgtttgggcgcgtaggcgtcctcatcgcgcacgtgcatctgccggcgtgcgttcatcacctcgcggcgcatcacctcaaggcccacgccgatacggcccgcggacttgcgcgcgtaagcgtcccatagggagcggtcgcgaatctgcgccaccagcggggccacggctttcatcgcacccacttggccgggcgtgtaggtcagatcgaaccggctgatggcggcgtcaatcacgaagtcatacaacggtttggcgcgggcgatcagcgagcgcactgcttcgttgcctcgctcgatgcgcaggtcgcacgggtcgagattgtcgtcggccacggccacgaaggtttgggagaggaaggccgaatcgaggccgaaagcgtgcagcgcggctttctggccggcggcgtcaccatcgaacgtgaacacgatgcgcgagctcaacggctggtccttgaccttcaacggcccgaccagctggaccgcacccagcgaatcgtcggcgatcaggcggcgcacaatcttggcgtgctcggcgccgaacgccgtgccgcacgtggcgatggcggtgtcgatgccggccaagtgcatggccatcacgtccgtatagccttcgacgatcaccacctgccgcttcttgacgatggcggatttggccaaatcgatgccgtaaagcacctgggttttgcggtagagctgcgtatccggcgtgttgatgtatttggcggcgatctggtcgtcctcatacagcttgcgcgcgccgaagccgagcgtgcggccggtcgaatcgcggatgggccaggtcactcggccgcggaaatagtcatagatgccgcgctggccttgacgggccaagcccgcgtcgaggatttccttctgcgtaaaccccttggaggccaagtggcgcacgagattatcccagccttggggcgcgtagccgcaaccgaaacgttcgcaatcagcttgggagaagttgcggccgccaagcagcttgcgggcgggcagtgcttccttggtcaagatctgggagacgaagaagcgctgggcttcctcgcaggcttccagcagtcgcgtgcgcttggagccggtgttttcgtgggccggtccgttgccgctgttctcgtagtgcagctcgatatggtacttgtcggcgagcagttccacggcttcgcggaagtcgatgttttcggattgttcgacgtatttgaatacgtcgccacccaagccgcagccgaagcagtgccacacgccgagcgagggacgcacgttgaagctgccggttttctcgtcgtggaacgggcacagacccacgaaggtgccggtaccggagggcttaagcgttacggtcgcagatacaatgtcatacaggtccgcggcggcgcgcaccttctcgacatcttccttcttaatcattccgaccataagtctctagagtaccgcctcacctgagacacggtaaatttttaccgtcggttatcatttcttccgcgaaactcccttcagtcgcctacagcgacagctcccctcacccgagggaagctggctcgcgcagcgagactgagggaagcgcccgcccaacacgccctcagcacaagatggagtgcagggccagggcggagttgtcggtcaggcttgcgacctgatcgatggcgacgcgcaggcgctcgttgtcattggtggattcattccaatcggccaggaactggctttccaaagcgtcggatgggagcggcgaatcggccataagcacatcgaccaaatccgatacgatcttgagctcctcctgatggaatggctcgcgctcgcgaggcgccatgacgaagtacacggcgatgcccttcaacgccacgatctcgtaattcgtgtcctcgggaatcacgatgttcgaggaataccgggtcaacggcccgggcccatacgtgtcgcgcgtggcggtctccaccgaccagcagaagcgaccgatcaaatcggacgtaatgttcttaagctgcgccaacgattcgcgcgaaccattgaaatgtgcagggaacaaatgctctcggcgcaatcgcatgaacgcggccagcagcttgtcggcatcccacttcgccccataccatgcgcgcgtctgctcgatgatgtggtccagcatcttcggatcggcgagcacaatcggatcgaacgcgccggtggcgatggaatcctcgacgtcatgcacggagtaggcgatatcatccgaaaggtccatgatctggcattccatgggtttggcggcctggggcgcgccgattttgagccagcggaacaccggttcgtcatccgggtagacgcagaatttcttcgaccgctcccccttcgggtgtcggtcggcttcggccaaggtccacgggtatttgacggccgcatccaaggccgcacgggtcaggttcacgccggccgaacgcccgtccgggtgaaagatcttgggttcgagccgggtcaggatacgcatggtctgtgcgttgccctcgaagccgccgatattgccggcgatgtcggcgagcgcacgctccccgttgtgcccgaacggcgggtgaccaaggtcgtgggccagacaggcgcagtcgaccacgtccggatcacagccgagcaatgcgccgatttgacgaccgatctgggcgacttccagcgtatgcgtcagtcgggtgcgggcgaaatcgtcggtaccggcaatcagaatctggcttttcgcgcccaaacgccgcaaagcggacgaatgaatcagtcgcgcgcgatcgcgttcgaaagccgtgcgcgacttggatttgggcggctcgggtgcccatcgctcctcgtcgaaggcgttgtagccctcatcgctcagcacctgttccccatccaacgttgtttccatatgccaagcataggcacacatatcggccgcagtaatcccgacttcccgaatatgtgccactgacgtcaactcaacggcacatattcgggagattggggccgatttcccgaatatgtgacgctcagcacatgtcaacggcacatattcgggaagaagggattacggggtgccaccgtatggcggtaatgcaccttatagcagcgtggcggggtcgagcttggcgaggtcggcggcgggcagtacttcggcggcatgctcgtaaaggcgcgggatgcggttgcgcaggcaggtgaagatctcgtagctgatggtgtcggcggcgcgggcccaatcgtcggcggtaggctcaacgtaatcctcgccgcggcccgggccgaacagttcgaccgtgtcgccctcgtgaacgccgagttcggcggcggatccgtgcaggtccacgatgaactggtccatgcacacgcggccgcacacgcggtagagcttcggaccttcagtggtcatgatgcgcaccgggccgcccggcttctccacgtgcttggcaccttccatatcgaaaccggaagcggagcggtggatgccatcggcgtagcccagcggcacaatagcggtcgaggtgttgtccggggtcaggtaggtgcggccataagagatgccatggccggcctccacatccttgaccgtgccgagctgcgcctgcaggcgcatggccggggtcagatgccagtcgcgcggggtgcccatcgcgggatcgggctcgtagccgtacaggccgatgccggggcgggtaagttcgaagtgaatctccgggcggtccaaagtggccgccgtgttggccaggtgacggatctccggcggaatgccggcctgttccatgcggcgcgtgaagtccttgaatgtttcgatctggcggtcggtggaggacacgaattcgggcacatcaggcgaatcggccacggcgagatggctccactgacccacaatatgcaacacgccctctttggcgagcggcacgagtttggcgagcgcggcgtcgaatccggccggcgtgaaaccgttgcgaccgaagccggaatcgaccttgacgtgtacgcgggcgggcttgccgagcctgcgtgcggcggcggccaccgcgtcgatgccgggcagggagccgaccgatacgtcgatgtcggcggcgatcagctcgtcgaacgggacttcggtgccgttgtatacccaagtcaaaatatggcagcggtcggggccgatgccgagcttgcgcagcagcaacgcttcgtgcgactgcgcggtgccgagccatgtggcgccgccggcgagcgcggccagggcggcgggcagcagtccgtggccgtaggcgtcggccttgaccacacccatcaccgccgtgccggaagcgggcccgccgaccacggagaccaggtgggccatgttgtcgcgcatggttttgaggtccacgatggcctgtgcggggtattggcggcgggcggccgcatagttggccttgccctgctcggacgagaatgcgatttcaggtgctgcgttcatgctcatagacacctattgttgcgcgagaatgtgacgtgtagtcgcaatcgtctgttttcgcccggcagtcgtacactaatgaccgatatgcggtttctcggaagccgcctttgattcccggcgttgaggcgtgccgggatcccggaaatccgtccggttcagccccataatcctagatttcatgagagaagaacatggatctgtttcgtaagaaaagcgtggatcagcttgtcgccgaatccactcccctcaagcgcacgatgcgcaccttcgatctgacgatgctcggtatcggcgcgatcatcggcaccggtatcttcgtgctcaccggcaagggcgcgctcaccgccggcccggccctgtccgtatcgttcctgctggccgccgtctgctgcggtttcgccggcctgtgctacgccgagttcgccgccatggctccggtctccggctcggcctactcctatgcctatctggcgttcggcgagctcatcgccttcgtgatcggctgggatctgattctggagtatgctctgcaggcggccacagtgtccgccggctggtcgggctacttcaacaaactgctggaaggcttcggactgcatctgccggtcgagctgaccgccgcctacggcaccaacccggacgtcaccacctacttcaacctgcccggtttcgtcatcgtgctgatcatcacgtgggtgctctcgatcggcatcaaccagaccaagcgcaccaacgacgtgatggtgctcatcaagctcgccatcatcgtgctgttcatcgcatgcgccgtgtggtatgtgaagccgtccaactggcagccgttctccccgtatggcgtctacaccttccagcccggctccacccagccgtacggcatcgtgccggccgcgtccatcgtgttcttcagcttcatcggattcgacgccgtgtcctcctccgccgaggagaccatcaacccgaacaagacactgccgcgcggcatcctgctgtccctggccgtttccaccgtgctctacatcgtcatgaccatgatcatgaccggcgtggtgccctaccaggatttcgccaagtacatcgacgccccagtggccggcgtgattctggagaccggcatgaactggctcgcggtgatcgtgaacctaggcgccctcatcggcatgaccacggtgatgctcgtacagctgtacggccagtcccgtatctgctacgccatgagccgtgacggcctgttcccgaagttcttcggccacgtgcacgagaagtaccgcaccccgttcaagggcacctggttcttcggtctgctgaccgcgttcgccggcggcttcatcaacatcaacgtgctgttcgagctggtgaacatcggtacgctgtccgcgttcatcatcgtgtcggccggtattctatggatgcgcaagacccagccgaatgcgccccgcggcttccgcgcgccgggcgtgccggtcaccccgattctggccatcgtattctgcttcgtgctcatcgccggtctcaactgggagacctgggtgcgtttcgccatctggttcggtctgggcctgatcgtgtacttcggctacagccgcaagcgctccaagctcggccttgagcagaaggccggggctgacaccaaggtcgctgcgactgaggactgaggtctatcggctgaccgatagccgatggctgctttcgtgaaaaccgtacgctgagttactttcagcgtacggtttttgcgatatgcacgagtttgaacgggcggccgacggaccgtacatgcgcgacgacgtggaccttacctgaccagctccaccgcggaaccgaacacgctggcgacagccacactcaccactcgtggcgctgataggcgattctggtggtgtcgaccggccggtcgagcagctggatcaggccgcaacgggcgaagccggagctttcgagcacgtgctgcatggccttgttattggggtgggtgtcggcgcgcacgttgccgtagtgcttcagggcccacctgatgcagtcgcgggccgcgtggcgcaccagaccggatgcggcgatgcggtggatggtcacataggtgtcgttgtccagccaggcgccgtcgattttggcgtaggtcggatccttgcccgggcacagggcgaactgggccagaatgcgttcgtggccattgcaggtgtcgaccagcagcatcgtacgctggttggcgatgtcgtcctcaatcaccgattcacgcggaaattcgttgccccactgggtggggttgccgttggcgaccatcaacgcgcgtgcgcgtgcgtagattttctgcatctgcggcagatcgcgcatggtggcgtggcggaaacggcggcctgtcgccttgtttgcagcgttcgactgagtcacttctcacctctccgacatgccgggttgccggcacggtgaccggcgactaactgacggccaacctaccatgccgtaggcacaagaaatcccgtccgcgttgcatgacggacactaataaacaatgactcccgtccgcaggagccggacagtccagccgagttgaggacagccaccctcagtcggcttcgcccccggctcccgccagcgggagccgaatcagaattgaatcgaatcagacgaatcagacgaccttgcgctcgaacgggtcggagctgatgccttcctcaaggatcagcttggcccattccttggcggtgaacaggctgtggtcgcgatagttgccgcagctcttctcggtggtggcgggcacgtcatcccatgtggccttgtatgcgatgaactccaacgattccttcaacgccttggccacatcctcggtggagtgggtgccccaggtcagcaggtggaagccggtgcggcagccgaacggcgagcagtcgatgtagccgggaatgcgttcacgcagcagcacggcgatggtgtgttcgatggtgtgcaggccgccggtggggatggcctgctcgttcggctgggtcaggcgcagatcatagttggagatcacgtcgccgtgagggcccgtttcggtgtcgatgtaacgcacgtacggcgccttgaccttggtgtgatcaagctggaatgattcgacgacgggcttttcggccgtttcttctgccatgctgttgcctttctacttgccgagtgttcggtcatgaagcatcgaacagtcatcgtagtcgagccagcccaagaacgcccgcaaatactccgcagttcgctataggagattgttatgacgcactcccggcattgaacgaggcgatggcttgcatgaagcgctggccgtagaggtcgagcttgtgttgaccgacgccgttgaccgccagaaattgcgcgttggtaaccggcttgatgcgggccatgtcgcgcaaggtcttgtcggagaacacgatgtacggcggcttgccgatttcctgggcgatggtgcgtcgcagttcgcgtagcttctggaacagcgattcctcgtcatcgtccgggatatacgagcccagcgcatcgccgggaacattggcggaatcggcagtatcagccactcccccgctccgaccggaaccggccgcctccgacttgcgttccacccgtttgatctcatagtggaagtcgggagcggcggtttcggccgcccgcgcaccgaacatgacgattggcatacgcccttcggcgattgacaggtacccgtccgtggccatctggctcaacacgtcgcgcacgcgagcctcgttcacgtccttgagcatgccgaaggtgggcatccgctccgggttcagccatgccagatcctgtgcccgcgaaccgcgcaggatcttgacgatcttgccggaaccgacgcgctgccccacgtcatgcacgcaacggctgatcgcctgcgccacgcgggtcacgtcgatggtctcgaacgtgctttcgcagttcgagcaggcaccgcatttgccggactgcgaagagtccgccgcaatgtcttcacccgccgtggaaccagcattcggcgacaattcctgaccgaaataccgggtcatataccggtgcaggcagtcggtggtgcggcagtagccgaccataccgtccagcagccggcgcttggactggcgaacgatttcctgctcttcgggagtcaatcgttcgttctcataatcgttatccagcaaccgacgccgggtgacgatgtctgactcattccacagcagcgtgcatcggctgggctcgccgtcacggcccgcgcggccggcctcctgatagtaggcctcaatggattcgggcagattgtggtggatgacgtaacgcacgttggacttatcgatgcccatgccgaaagcgttggtggccacgaccaccggcaccttgtcggtgatgaagtcgcgctgggccgcctcacgcgcgtccggcgacatgccgccatggtaggcaacggccggatgccccatctggttcagcgtgtcggtgagcgcttcggtggtcttgcgggtggcgcagtagacgatgccggattcgtccggatggtcggccacataccgcgccacccatgcggccttgtatttggtttccagtttgaccacatcaaaatacaggttcggccggtcgaatccggtaacggtgacggccggattccgcaatcccagcagtcccacgatgtcccggcgcacccgttcggtggcggtggcggtgaacgcacccaccggtggacgctgcggcagcccggcgatgaaatcgccgatacctaagtacgacgagcggaagtcctgaccccactgggagacgcagtgggcttcgtccacggcgatcagcgagatcggcgtacgggcggcaaagtcgcggaatcgcccggtttccaagcgttccggggccacgtacagcagtttgatctgcccggcggcggcttgggcgaacaccatcgcctgctcgtcgggagtttgagtggtattgatgaacgcggccggcagaccgaggtcgttcagcgcatcgacctggtcgcgcatcagggaaatcaagggagatatgaccaaagtcatacccgggctgagcgcggcgggaatctggtagcacacggacttgcctgcgccggtgggcatcacgcccaagacatcgcgtccggcaagcaaagcctcgacaattccttgctgtccgggcctaaacgagtcatagccgaagtatcgtgtgagcgcctccagcgccgcctgatgtgctgtcataaacgaccagtgtaggccgaccgcggctggatttcagcgtataacggaatacctcgcaacgatgtacgtagcccttccgtattattatgcgtcaaggaacgttattcccggcatatcgcacgatatgccgctttgagagaactaagacggggcattttgatggccaacgatacattttccttctcctctcctgacgatcaggagacggcggtgctgcagcctgtggccaccgatgggctgttcgcagccgcggattcaggtaccgccacaccacagcaaagtgacaatggcaccaataaccatgccgataatacagcctatgtgggtgaacatgttatggcatctaccaccgctaaatcacatggcaaggccgcacggattgccatcataaccatatttgcagtgttgcttgccgcattaatagcctatttcttcgtcggacgttggtacttccaagacaaggctgcgcccggtgttcatttgggcaatgtctctgtcatgggccagacccgcgaagaacttgcgaatactgtgaagcagcggctgaataacaccacggtgacgttcaccgccgaaggcaacagcgtcaaagcctcgctgaaggaccttggcgtcaccgtcgacacggataaaaccgtagatgcgctgttgaacgcgaagaccggcgacgtggccaagctcaatattttcgatcagccgcatatcgctctgaccgccaccagggacaaagagactgctgaacaattcgtcaccgccggcctggtcgatgaggccgaccgagcgcagattgccaccgttgtctacaacaagagcaccaagcagttcgattacaccgcgggtcaggatggcaagggtccggatatcaatgttgtcaatgctgcagtcaaggaggccgtcgcgaccccgggcgaaaatgcgacggtgccggtcaagctacagactgcaaagaatccgattgatgacgcgagcgcacagcaaacacagtttgacgccaatgccaagcttggcctcaaactgaccgtggacaacggcgtgaacaagagcgtcaccatcccggccgataccattgcctcattcctcaagcccacggtgaataaggcgggtggcaccatgagtctggtagtcgaccgcgatgccatcaccaagtacgtcaccagtgacagcgtaaccaaagaactgactgttcccaaggtgacacgcgaggtctacatcacgccgaaagacgaaggcggcgtggaaattggtgccgataagacactcggtgtggatggtattgaagtgactggtgccggggacgcccccgaacgtctggctaccgccatcgagcagaaccagtccactgattccactgtggctgtgaaagacagcccgtatgatgtcaagcaggtcgaggtgcctcataacttcgatacggcaaatggcgataagtgggttcatgttgatctgacgaaccagactgccactgcatatcagggcaccacggtggtcaagaagttcaacatcgcttctggcaagcccaccgccgatggttccatgctgtccgataccggcacgttctacgtgtatctcaagtacgaatcgcagaccatggttggcgaaggctacaaccagccaggcacgccgtgggtttcctactataacggcggcgaggctctgcacggtgttcctgcatacatgtggggcgagcaccccatctatgtgcagcagggtatcccaggctcgcacggctgcatcaacatgcaggtggccgatgccaagtggatgtacgactttgccaccatcggcactcgtgtggtcgttgatggcaccacaccgacttccggtcagacgttgcgcccggctggtgcggatgccactggatggcagggcggcaacgccagctgattcaatatgtttaatcgataacggaaaatccccgacccttgtgggccggggattttttgtaggtaccaatcgatagcgagtccgccgataagcgtggtggcaccgtcaatacggtgccaccagtaccgtcagtacggtcagatacgatccaacgcctgcttgagatcggcgataaggtcgtcggcgttctcgataccgaccgaaatgcgcaccaggttggcgggcacctgcagggtggtgccggccacggaggcgtgggtcatggcggcgggcacctcgatgaggctttccacaccgccgagcgattcggccagtgtgaagatctgcgtgtggtccacgaagtgcttggccgcctcggcgccggccgcgagctgcacggagacgatgccgccgaagccgccgtgcatctggcgggcggcgatttcatgacccgggtgggactcgaggcccgggtaccagacgcgctcaatcacatcagagggctgggattcgagccattcggccaccttcagggcgttggcactgtggcgcttgacgcgcagatccagggtcttcaggccgcggatgtccagccaggagtcgaacggggagggcactgcgccggcggcgttctgcaggaaggcgaccttctcgcgggtctcctcatcgttgaccaccacggcaccgccgaccacgtcggagtggccgccgatgtacttggtggtggagtagaccaccacatcggcgccatcggccagcgggtgctgaagggcgggcgaggcgaaggtgttgtcgacagcgaccttggtgccgtacttgtgggcgacttcggtggtggccgcgatgtcggtgatgttgagcagcgggttggacggggtctcgacccacacatactggtagtgcttggaggccaatgcggtttccacggctttcagatcggtgatgttcaccacgtcgaggcccacaccccacggcacgaacaccttggagagcaggcggtaggtgccgccgtacacatcgttgccgagcaggatgttgtcgccgggcttgatggtggagcgcagcagcacgtcgatggcggccaagcccgaggagaagctcagcgcgtacttgccgccttccacggcggcgagctgctcgtcgaagctggtgcgagtggggttgatggagcgggagtagtcgtggcctcccctgaggcccaacacgccatcctgcttgaaagtggaggtggcgaagatcggcgtgacgaccgcaccggtggtcgggtcgggctcctggccggcgtggatggcgcgagtggcgatgtcggtgttggcgaacttggcgttgtattcagcggacatgatattgggttcctttcgggatcgttccgtattcgaaggtagaacaggtgcggttggttagtgcggatgttggtattgattcttttgatagctagttatggagtccgtccccagctccctcatcagagggagctccgttaaggtactgctcggcgagggagggcttgctggtgcgctccacgatgtcgccgtagccgttggcacgcatccagtcgtcgttgaagatcttctccaagtagctgcggccggaatcaggggcgagcaccaccacgatctggttctcgtccaaatcattggcaagcgcgtacttgatggcgctggccacagccatgccggacgagccgccgaccagcagcgcctcctcgccggccagacggcgggtcatttcaaaggcttcggcgtcggacacgcgcacgatgtcgtcggtgatgttccggtcgaaggccttgggatagaagtcctcccctacgccctcgatatcgtactggtggacttcgtcgcgtgaggaagcggagtagatggagccttccgggtcggagccgatgaccttgaccgcgccgttggaggcttccttgaggtacttgccggtgccggagatggtgccgccggtgccgatgccggccacgaagtgcgtgaccttgtggtccgtggcctcccagatctcaggtccggtggtgtagtagtggctcagcgggccgttcggattgtcgtactggttcgggcggaagccgccgggaatcgtattggccagtcgttcggcgacctgatagtaggagcgcgggtcgtccgggccggcgtcggttggcgtgacgatgacttcggcaccgtaggcgcgcagcaccgcgcgcttggattcggagaccttgtccggcagggtgaaaatcgtgcggtagccgcgctgctgggcgaccagggccaggccgacgccggtgttgccggaggtgggttcgacgatcacgccgccgggcttcagttggccggactgttcggcggcgtcgatgatgcgttcggcaatgcggtccttggaagatccaccggggttgaagtattcgactttgacggcgatggtggctttgacgccggccgcctgcggaatgtggttgagcttgacgagcggggtgttgccgatgagttctgcgaggctgttgtggatggtcatgtgaagtccttcgttgctggggttgtgggggttttgctgcgttgcgttcgtgaaccgacgttcccagacgaatggactgtggctttggtttgaaaatcgagtattcccgctcactgtacggtgaatccgaaaagtgaatcggtttttcatgttaaccacgactcgcgcgttacacggttacgctcgtgccatcgatttcatgaaaattcatgcgacagatttgccgcgattcgaatgctctatctcaagttatgcgtcactgaccgctcgcccaggggcgtcggttagcgacaacaacatgagataatctgcatgtctcacaccatagcacaacccgcgacaagcgcgtgtcgccggcggcctcggctcccctccctgaggggagctggccgcgaagcggactgaggggaatacgacggcacccgtaactcccctcagcctcactgcgttcgacagctcccctcagagagggagccaaaaaaggtctataacgaggctgcctcgatgagctgacgggtgtaatcggattgggggttgccgagcacttcagcggtggaacccgtctcttcgagacgcccgtcatggagcacgaggatgcggtcggcgatgtgctgtaccacgccgagatcgtgggagaccatgatgatggcggtgctcggccgggccgcgcggatggcggcgaaggtgtcgaggatctgaatgcgcgcggccacgtcgatggcgctcatcggctcatcggcgaggatcactttgggctcgttgatgatagcgcgggcgatgaccacgcgctgcgcctggccgccggacaggtcgattgggtaccggttcaggaagtctgccggttcaaggcctgccatggtcagagccgcggccactcgctcgtcgatatcggtgttgttcaggtcacgccgttgcagactcagcggttcagccactgatttggcgactcgccaacgtgggtcgagcgaggagaacgggtcctggaacaccagtcccgattcgcggcgcagggccgcgaatcccggcgattttcggccgccgacaatggattggctctcgtattccacgctgccggagtccgcggattccaagcccagcataatgcgggtcagcgtggatttgccggatccggagccgccgatcacggccagacattcgccggcgtggacgtcggcggagacgtcgaagaggacttggtggcgtgcggtgcgcgggccgaaggatttggtgatggagtgggcggagaggagcggcacactgctgttactcatgcgaatcctccttgggggtgtggagggtgagggtttgggcggcggcgaccaggcgctgggcttgtggtgtggtcggcgcggcgagcaggtcggcggtgggtccggattcgacgatgcggccggcgtccagcacgtagcagcgggtggtggcacgcgcgagtacggagaaatcgtgggtgatgaacagcatggaggcaccggcgtcgtccaccagcgaggtcagcaggtccacgatctggcgttgcgtgatggagtcgagtgcggtggtgggttcgtccgcgatgatgaatcgcggtgaggtgatcagcgccgtggcgatgcccacgcgctgctgttggccgccggacagttcgtgcgggtatttgccggccatatcgagatccagcccgaccttgctcaacaaggcattcactcggtcggctcgttcggccttggtcagatcatagtgcaaccgcaatggcaaggcgatctgctgcgccacggtcatcaccgggttcagcgcatgggccggattctggaataccgtacccacataccggccgcgcaggtcggcaagcgcacgttcggaagctccgataatttccgtgccgcccatatcaatcgacccattagtcacagcggtcaggggcagcaaccccagcatcgccttggcaatcatagattttccggagcctgaagaaccgatcaagccgactcgttcaccgtcggcaatggtcatatccgcatcagagacgattggtttgccgccaatcgtgattttcagcccgcgaacatcgacgctcatcgttcgcctcctatttcacgtaatgcggggttggtgaccggatcgatggcatcgcgcagcacatcaccaaaaatattcagcgccacaaccacaaccgtgacgatcaggccgggccacaccacggttaatgggaacacgttgatgagtttgaccgaagtggccagagaatgcccccagctcggcacaccggacggcacaccgataccgagataagtgagccccgactcagccaacaccgccgtgcccgccgacaatgacagttgcacagccaataccggcagaatattcggcataacatggcttatgagcacacgccacccgctggcaccattggccaaggccgattccacatatgacgagcgggacgccagcaacgctgcggggcgagccacacgagccagattcaacccatatccgaagccgcaggcgatcacaatcaccgcgattgacgctcccaacggcacagccagaatcaacgcaatcaacacggtgggaacggaaatcaacgcatcaactaccactaccgaagaactggcgagcgccgcattgcgtgccaccatggccgcgatgagcagcagcccccaagccatagatgccactacggtcagcagcacgatcacaagattggtatgtgagccggccagcagccagctgaacacgtccgcgccggtgccgtcagtgccgagccagtgctcggcggacggcttggcccatacatggtagccatcagtggcccacagcgattgcggggtccagaacagggaaacgatggcaatgagcaaccacagagcgagcacgataagtgcgaatttgccctcggcacgacgccacatagagtgcaggacgatgacgaaggcagcccgtcgatcaccagtcgtcgcacgacgaacattgctcatgcggtcacctccgtaatggcggtagcggttttcagacgcgggtcgagcacgcggtggaacaaatcgaccacgaggccgacagtcaaaaagaacgcggccagcaggaacagctcgctttgcacggcaatcaggtcgcggttgcccacgtcggtcacaagaccgttgccgatgcccggtaacgcaaacaggttttcgatgaccatcacgccagtgaccatcgaagcgaaggtcagcccgataacagacaccagctgcggggttgccaaccgcaatcccacacgcaacaccgcctgagtgcgcgtcatgccacacgagcgtgccatatcgatgtagccggaactggctaaatcccctaaggccgcgcgcgtgtatcgcataagcgatgctcccacgatgatgccgaccgatacagccggcaataccaacgctgatatcgccgaaccgggtgtgccccaaccatccagcgggaacccttgcgagggaaacacatcaagcaatcctacgccgcgcccgaacaacagaatcagcagcagaccgccccacaacgcaggtacggcaccgccgacaatagccagtacatgaaacaccgcacgcaccgttgcgctgcgggccagtaccgccgcacagcccagcggcaagccgatgaccaaggcgatgagcagggcaagaataatcaggggaaaggtgatggacgcacgtgcgcctaccaaggaggttacggagcgaccagtcaggattgaagtgccgaagtcaccacgggccagcgcactcatccaatcgaagtattgtgcaatcaatggccgatccagaccgagttgttcgcgtagctgggtcacacgctcaggcggcgagttgacgccggccatcacggaggccacatcgccaggcagaatgcgcaatgctgcaaaaaccaccacggacaggccgaacaacgccaccacgaataacgccagccgtttcaacacgaatcgcataatgcctactttacttggattaacaatgagccccctcactgagggagctcattgctgtaacgaactacttcgtgtaggtcacgttgtagaggggcagaacggtctggttgaggtcgaaggggaatccttcaacgcccttggccgtggcggtggtgatgcggtagttgaacagccagtcggccggcgcatcctcggagacaagcttggcggccgcggcgaacttggcatcacgctccttgtcggaggtggcggcaacaccctcgttgtacagcttggtcacattcttgttgtcgtaaccgaaatagtatgtcggatcggtccacgatgcgaagtcgtggctttcgttgtggtccaccagcgaaatatcgaaggtgtggttggtgtacacatcctgcagccacgtggagaactccaccacattcaccttcaggtcgatgccgatgggcttgagctgggagcgcagctggtctccgagctcggtgccgtagatgttggcgtaggtcagcgtaagttgaagcggcttgtcggtggaatagccggcttcagccatgagcgacttggccttgttctgatcatacgggtacagattcgtcagatcctcgtagccggggtcgagagacgggatcgggccgccgagcgccttgtccgcaccgccgcgagaggcgatgagctccttgtggttgatggcgtaacggatggcctggcgaatgcgcttgtcagccagtttggaaccggaagcgttgttgaagccgagcacgaacttgtcggtgccgttgccggctttgaccgtgtacttggcggaatcggacttgaacggttcggcgaggttctcggtaatcggggcgagcacctgcacgtcaccggacttcagcgcattgaccgcggcgttgtcgtcggccagatacttgacgaccacggtgggcgtcttggccttgttcttgccccagtacttctcattggccttcagcgtgatcgagctgttttccacgaacttggcaacggtgtaggggccggagccgacggcctgcgtcttcaggtcatacttggcgtccttgtcgaacacgagccctgcgcgaccggtcagggtccacaacaggttggagttcggcgtcttgagcgtgatcaccgcggtgtcggcgtccttggcctccaccttgctgacggcggcgagcgcgtcggcgtcgtggtagcccttagcgatcagctcgttgatggaccaggccacgtcctcggcgtcaagtttgtcgccattgaagaaggtcatgttcttattgaggtggaaggtgtaggtcaggccgtccttggacgtctcccagctggaggcgatggcgggagcgacctggttcttggagtcacgtgccacgatgccttcgtatacgttgccgatcaggatctggtcaagcgcggagccggcggtgttgcggatgtccagattggtgggggccagtttgaggccgatggtcacggtgtcggcatattggttgctggacgaagccgacttgtcatctttcttaccgccgaaagcgagcgtgacgccgatgacgaccgccactgccacgatgacggcaatcagtgagatcagccaccacttcgggccgctttttttcggattctttgcgcgcgaggcaaggctcgcatctgtggttgcgccgtcttcgacgtgcgcaccattgtcttgagacatggttcttcctctgtatatgttgtgttctacggttggccgccacgctgggtcgaccaccgcaggccatcatagccatgggactgtagaattgcgcatgaaatccatcttgaatctggagggttatcatgctggtcgccgttgatatcggcaatacgaacatcgtgctgggctttttggatggcgatgccatcgccggcacctaccgcatcaccaccaaagccaaccatacgtctgatgagtatgggctgtttctgactgaattcctgagaatgagcggttttcagccatccgatgtggacgatgtgatcatctgttcggtggtgccgaaagtgatgcactccttccgttcgtccatcgtcaaattcctcgacattgatccgatggtggtgggaccgggcatcaagaccggtatgaacgtgcgcgttgacgatccgaaatcgctgggtgcggatattctggccgactgcgccggtgcctattacgagtatggcggcccagtgctggtggctgatttcggcaccgccaccacgttcacgcacgtgagcgacaagggcgtggtcgattccggcgtcatcaccaccggcatccgtgccggtgcggccgctctgtggggagatacggcccagctgccggaagtggaaattacgcgaccggatacgattctgggcaccaacaccaagacctgcatgcaggccggtttgtattacacgttcttgggcggtgtggagcgcacgattcgtcagttccgcagagagctcggaggcgaggatttcaaggtgatcaccaccggtggcctcggtcgagtgtttgagaatgacaccgagctgattgacgtgtatgacccggatttgattttcaagggcatggcgcacatctactcgcgcaatgtgaagtgacgtagtatgcaggaatcggccgcgtatagcgcggtcgattccgacccaaccccgaatccctacttaatcgtaaagccctgattgaagccgtattctcggaggtctttctgccattgggccaggccgtcggagagactgactttcttgccgggcttctccaacggttcgagcgggttgccttcctcgtccttcatgcccatctcaatggcttcctgtcgctgctgataggcgtggaaactgccggaccactcgtatgcctggcccaccgtcgatttgaagtcactgcgcgcatacacttcgaatggcagatactggtatccgaccgacacatcctcggcggcctccgacagtacccggttgaacttctgcccgccgaaatacgggatttcaatgccacggtcattggtaatcgtggttttatccagaaaatcagcggaattcagggtggcgtaatcggccggaaaggcaccgccgtctacacgcgcgctaatgccttgggcgtcatgcgccacaaagtccacgaaacgataggccgcatccggcttacgggtcaattgcagtacggtcagtgccgacccgccgctttcggcgttggtgggctggccatcataggtgggcatgggagccacgcgccacagaccggccgcgcccggcacattggacagcagcagcgacggcatccaggccccagagaacacggaggcgatggtaccggtgcccacacggcgcttccatcggtcggaccatgtggcggaggtggtgtcaacaagcccctcatcgatcattttctgccagaattcggtgaaccgttgggtgccggcgtcctcatccaaatcgatggtcacggttttgccgtcggccgacgtgtggaacggctggccgccggcgagccagaccatggcatcgtaaaagctgccatcgcccgagtcggcggcgatgtacacgccaatctccttgagctttttggcagcctcatagtagtcatcccaagtcttgatcttggtggcgtccacgccggcttggcggaacacgtcttcgttgtagaagaagcccatcgggcccgaatccatgggcagcccgtaggtacggccggcgagctgcacggacgaccatgtgccgagggtaaagaagttggaataatccgagccgattttgtcggtcagatcaagcaattggccggagaccgcgtactgcaacagtgcatagtattcgatttgagccacgtccggcgtgccgtaaccgtcctgaatggcggtgttgagattgccatagccggagatgttggtccatttcacgcggatgtccggattggctttttcgaaacggcggatgacctcgcccatgctcggttcccagctccatacgctgatttccgtgcggttatcggtggtggactgcccgcacgaggccaaggatacggaaaggatggcagtcactgctatggttgccattcttttgattcgctgtccgatcactcgcatggtgacgagtgtactaggcggggcttaaaacggtaaaagccccgtgacgggattcgtcacggggctttgtgtatcaggtgagattagctaggcagtctcagcgagggttcaaggcttacttcacggtgaagccctgatccttgccgtaatcctgcagtgccttctgccaagcggcgataccgtcagtcagcttctggtcgccggtgtaggacttgccaaggtagtcgccgaagatggtgcgggccttgacctcgtagggcaggaactggtagtcggaggacacgttctcagcagcctgagccagaacctcgttgtacttctgaccaccgaagtagtcaacgtcctcgccatcggcgttcttcacagtggtggtgttcttgaaggagtcggactccatggaggccttgtcagccgggaatgcaccgccggccacacgggtggccacgccgtcgccgtggttggcgtactcgatgaactggtaagcagcgtcagccttcttggtggaggcgagcacagccagcgaagaaccaccgttctcggagttggtggtggagccgtcagcggtcggcatctgggtcacacgccacttgccagcgccgtcagcagcggagttggccaggttggcaggcatccaagcgccagtgaacagggaggcgatggtgccgtcgaccatgcccttgaaccagtcctcagaccagccagcggtcttggtgtcgagcaggccctcgtccagcagcttctgccagaagtcggtgaaggtcttgacgcccttgtcctcggtcaggttgacggtgacttcggaaccatcggaagaggtctggaacggctttgcaccggccagccaggtcatggagtcgaagaagccggcgtcaccggtgtcggaggtgatgtagtagttgtcgcccagagcgtgaatcttcttggcggcgtcgtagtactgatcccaggtcttgatctgctcggcgtcaacaccggccttgtcgaagacctccttgttgtagaagaaggccattgggccggaatccatcggcaggccgtagaccttgccggcgaactgcacggaagcccacgggccaggggtgtagaagtcggagtagccggaggtcttgtcggtgatgtccagcaggttgcccttgatggcgtactgcgggatggcgtagtactcaacctgagcgacgtccggagcaccggagccagcctcgatggcgttatcaagctgggtgtattccttggtgttggtgccgacgttcttgagatcgaccttgatgccggtcttcttggtgaagtccttggcaacctgggtcagcgtgggctcccaagcccacacggtgatttcggtaacgtccttatcttgagccggcttgccactggcggtgtcggaaccgcaggcggcaacggaacccagcatggcaaccgcaccggtaagtgcaatggccttcttagcaacggtgaacttcatcgttctgttctccttccttggatcgcctttcggcggtctgcagtgattgtcaccacaacagcatggcaactctcctcgtcgtcatgctatcgtgaaccatcactctatggttcagtagtcacaaaacggctttgtttcgccactttgtagctatggttgcgataacatcttttattatacacattcttcggcaacacgccatcttggtatcgcaatccgcgcgccactgctcccatggcataagaaaatcgggcgctccgaagagtgcccgatcctgttatcgcaacctcccgctacagaaaccacaggaggaagtctgctgtgattgccgttacttcacctggtagccctgctgcttggcgtaatcctgcaggtccttctgccaggaagccacggcatcggagagcgtggtcttgccggtgtaggcatcgccggcgtagtcgccgaacttgccgcgagcgtagacctcgaagggcaggaacttgtagccggtggacacattggctgcggccttggccagctcctcgttgaacttctgaccgccgaagtactcgtgggccttgccgtcggagtcggtcagggaggtcatgttgaggaagtcgttggacttgagggtgtcgttgtcggccgggaaggcaccgccgtcaacacgggtcttaatgccctcggcgtcgtggcaggcgtattccatgaacttgtaggcggcggcgaccttggccttgtcgtcggacttcacgatgaccagcgaggaaccaccgttctcggagttggtctcggagccgtctgcggtcggcatctgggcgatgcgccacttgccgtcaccgttcggagcgccggaaagcaggttgtacggcatccaagcgccggtcagcagggatgcgatggagccgtcatccagacccttgttccaatcgtcggtccagccgacggtcttggtgtcgatgaggtcttcgtcgatcatcttctgccagaagtcggtgaaggtcttgacgttcttgtcaccggtcaggttgatggtcacggtctcgccgtccttggaggtctcgaacggggtcgcgccggccagccaggtcatggagtcgaagaagccggcgtcaccggaatcggaggtgatgtaggagtccacggcgcgaatcttcttggcagcctcgtagaagtcgtcccacgtgcgcacctgggtcggatcgacgccggccttgtcgaagacgtccttgttgtagaaccaggccatcgggccggaatccatcggcagggcgtagacgccgtcattgatgctcaccgaggaccacgtgcccggggtgtagaagtccttgaaatcggaggcgccgagatcggagaggttctcgaggtggccgcgaatcacgtattcgggcagtgcgtagtattcgatctgggcgatgtccggagcaccggagccggcctcgatggcgttggacagtgcgttgtactcgtccttgttggtgccggcattggtcaccttcaccttaatgttcgggttcttggcctcgaatcccttgatcgtacgaggcagtgtggaatcccaggaccacacggtcagctcgatcttcttatcagaggagccggtgcttccgctatccccggcagaggtggaaccgcaggcagctacagaggagagcatggccacagcaccaatcagggcaattgtcttcttgccgaacttcatcgttctttccttccttgttatgggaaacgacgggacttggcgttttgttccaagtattgtatcgttttaagaaacggtaccacatgttttatgtttacgcaaacacgacacgtcgcaccatggtgactaaccgcaaaccgaaggagatgcatcccgctcatgaccactcacaacagccagtattccgccgaaaccacccatcccgacaagcaggaaagcagcccggcgccgaccgccgccggcaccacggccagtaacgtctccacaaccggcaacgcaaccacgccggacgccagcatcgccctcaacgccgacgccactccggtagccgacgttcccccgcgtctgttcggctcattcgtagaacatctgggccgctgcgtctacggcggcatctacgagcccagccatcccaccgccgacgaaaacggcttccgccaagacgtgcttgacctggtcaaggagctgggcgtcacctgcgtgcgctaccccggcggcaatttcgtatccaactacaactgggaagacggcatcggtccacgcgagaatcgccccgtgcgccgcgacctggcctggcattgcaccgaaaccaacgagatgggcatcgacgacttctaccgctggagccagaaagccggcaccgaaatcatgcttgccgtcaacatgggcacccgggggctgaaagccgcgctcgacgagctcgagtatgtcaacggcgcgcccggcaccgcttgggcggatcagcgcgtggccaacggcatcgaggagccgatggatatcaagatgtggtgcatcggcaacgaaatggacggcccgtggcaggtgggccacatgagcccggaagaatatgccggcgcggtggataaggtggcccacgccatgaagctcgccgagtccggtctcgaactcgtggcctgcggttcctcgggtgcctatatgccgaccttcggcacgtgggagaagaccgtgctcaccaaggcttacgagaatctcgacttcgtctcctgccatgcctactacttcgaccgcggccataaaacccggaccgccgcctccatgcaggacttcctggcctcttccgaagacatgaccaagttcatcgccaccgtctcggacgcggccgatcaggcgcgagaagccaacaacggcaccaaagacatcgccctgtccttcgacgaatggggcgtatggtattcggacaagtggaacgagcaggaagaccagtggaaggcggaggccgcgcagggtttgcaccacgagccatggcccaagtctccacatttgctggaagacatctacaccgcggccgacgcggtggtcgaaggttccctgatgatcaccctgctcaagcactgcgatcgcgtgcgttccgcctcgcgcgcccagctggtcaacgtcatcgcccccatcatggccgaggaacacggcccggcatggcggcagaccacgttctacccgttcgccgaagccgcccttcacgcgcgcggccaggcctacgctccggccatcagctcccccaccatccataccgaggcatatggcgacgtgccggccatcgacgcggtagtcacgtgggatgaacaggcccgcaccggtctgctgcttgccgtcaaccgcgacgccaacaccccgcacacgctcaccatcgacctttccgggctgcccggcctgcccggtctcggcacgctcgcgctcagcaaggcgcaactgttgcatgaggacgatccgtaccgcaccaacaccgccgaagcgcccgaagccgtcacgccgcaaccgctcggcattgcgatgaacgccaccggcacctgcacggcaacgcttcccgccatctcctggatcagcgtggaattccacggctaaaagacggagagtcacgcccgtaccaagtacagtcaagtccaatacgaccagggcccgtcaatcaccatacgattgacgggccttgtcattcacttcggatatttcgaaccatggattcatcaggcgcaggccaacgccggtgaggactcgcgcagggagaggctatagggggcctcgatggtttgggcaggagcgcgactgccggattcgacctgttggatgatggattcgacggccagtcgggcgatggcttccctgccggggttaacggtggaaagagacggcaccatgtaggccgattcctccacgtcatcgaagccgataacgcgaacatcatccggcacggcaacgccgcgttcgcgcagttcacgcagcacgccccacgccagcaagtcattcaaagcgaacacggcatcgaattgcaggccactctccagcatggtgtccaccgcgaccaaaccgtcggcgctcccccagccttgggtttcgataagcagactgtcatcacaggggatgccgcgcgcggccagcgcctcacgatatccgtgggtgcggatggagcccgacgagaaatcgtgctcggggtggggcacggcaccgactacggcgatgcggcggcaaccggcatcaagcaggtgataagtcgcggcggcggccccttcgcgattgcgaatcactacgtgcggcgcgttgacgccgaacaaacgttcacccaacagtacgagcgggtaatcgccatccaaagccgcgatatcgtcaaccgtcatcatcagagggcttaagatgagcccgtccgcgctgtgcgtgcccatcgatgcgatgctttccagctcgcgggcacgattgttagtggtggattccacgatgacgccgtagccatgttgccgggcctcggccagaatatcctcggcgagttcggagaagtacacctgccgcagatcgggaataaccagcttgagcaaccgggtacgcccggaacgcaggtttctggccgacgagttgactttgtatccgagcctgtcgatggcttccgcaatacgcgcggccatcgcctcgctcatatatggctgtttgttcagaaaattagacaccgaggctaccgaaacaccggcctcatgggccacgtccgccatcgtcactctgtttttgcctcgcacggtgaccaccctacccgactttgctggagatacgaaaacgactcccctgctacgatgagcagcaagggagcctttcggtaattaggcgctatgcgcggttttacagcttgacgacgagtacgccgttgggctggatggcggccgtgtgctcggactcgttgacctgggccagcgaggcgaccagcggttcgccttccacgtccacgaccgcaacatcgtgggtgcggttgaacaggaacacgaagtggttctcgccagtttcgtccgcacgctcgacgcgcagcacttcaccgcgatcgtcctcagccgaagtctcgatgccgagttcctccagcagcacgggcaggctcttggccaaaccctcacggccgagacgggcaccgacgtatgcggccttgccgtcgccgaagtcgttgacggtgatggcgggagcgccgtcgaaaccggtccacttatctgccttgaaggaggcgaccacgtgagcggtatcggccacggaggtgatcacgtcggcgaaatcgtgcgccacggttccgttgtccaagtcaaggtggtccatggcaccggggaagtcgttgcccatcggggcgaattcctcaacgcgcacacccaccacgtcacggatggaaccggggtagccacccagccagacgtgatccttgtcgtccaccagaccggtgtagtaggtcacgaacagcttgccgccgttcgccacatactcgcgcacgcggcgcgtggtctcttcggacaggatggtcaggctcggcagcacgacggcttcgtactcgtcccaagggccgcgaaccggcaccacgtctgcggtcagaccgttgtccgccagcgcgcggaaccacgcgagcggctcggtccaatggcgtacctcctgagtaggcgtggcggtgtgttccgtagcccactgggactcgtaatcgaagacgacggcgaccttggacttgaccagcttggtgctcagcaggccctcgtcagcaagcttgttgaggtcggcacccagctcgcacacatcgcggaagatctgggagtcggggcccgcgtgaggaaccatcgaagagtgccacttctcggcaccggccttggactggcgccactggaagtagcagatggcgtcggagcccatggccaagtgggccagggagtcgcgcaccaattcgccgggctcgacgcgatagttgatcgggcgccaattgacggcggagctggagtgctccatgaggaaccacggattcttgcgggcgatgccgtcacatagggaggccgagtaagccagctcgtcgaagtgagcttcgccaggcgtgaagtagtgatcgttggacacgaagtccacgtcgtaaccccacttgtcgtaatcgatgccggcaccgccggcggagaccatgaagttggtggtctgcggcttgggggcgatctcgagcagggcgtcgcgctcggccttgtaaaagtcgagcagggcgtcggagctgaagcgcttccagtcaagcagcttgcccgggttcatgaagttgccgtcgccgatgaagcgcggcgggatgatctcggaaaaattgttcatgcgctgcgcccagaatgcggtgccccaagcgtcgttgacggcgtcgatggtgccgtacttcttctcgcaccacttctggaaggcgcgctcggcgtcttcggaatagtcgaagcggttgtggcagccgtactcgttgctcacatgccaagagaccacataggggttgtccttgtagtgctcggccatcttgcggcacaagctgagcgcgtagtcaaggaagaccgggctggtggcgcgccagtgctggcgggcaccgggctggcagacgtcgccgcggtagtcgacccagaggatctccgggtgggcctgggtcatccacatcggcggggatgcggtgccggaggcgagatcgacggcgatgccggccttaccaagcttgtcgatgacgcggtcgagccaatcgaagtcgtacacgccttcttcgggctcaagcttggcccaggagaagatggccacggagacgaggttgacgccggcctgctgcatgagggctacatcttcgtcccacacttcctcaggccattggtcggggttgtaatcgccgccgtaccagatgcggggcttgttgcccgcaagcggctgcggccacttgaactctttacgttccatgatgattcagctcctttattgaattttatcgataatctgcgtccgcgggaataaacagcccacagggctgtttgcctaacggctcagctcgtcagagaggggcttggcactattacctccctctgatgaggaaggttgtctcggcggagccgggacggagggagagaccccgccgcgaggcggtgaagacaccgcgtcggcggagccgactccatcactccttgacggcgcctgcggcgagtccggactgccagtacttctgcaggcacaggaacgcgatcaccagggggatgatcgtgatcagggagcccgtgatcaccaggttctggatcgcctggccgcccgcggtcgaggcctggtccttccactggttcaggccgatggtcagcgggtaccagtccgcgtccttgagcatgatcaacggcaggaagtagttgttccacgtcgccacgatcgtgaacagggccgtcgtaacgatgcccggagccaacaggggcaaggaaatctgccagaacgtgcggaactcggacgcgccgtccacgcgcgccgcctccagcagctcctggggcacggcctgctcgctgaagatccacatcaggtacaaaccgaacgggctgatcagcgacgggatgatcatggcccacggggtgttcgtcaggcccaatttggcgaacaggaggaactggggaaccgccaaagcgatgcccggcacgctgatcgcgccgatgatgaccacgaacaccgctttgcgccccgggaagcggaacttggccagagcgtagccgcccatgatcgccagcagggtcgcgccgccggcgccgaccaccacgtacaggatcgtgttgaacagccagcgcgcgaagataccgtcctgataggagaacaccgtcgcgatgttgtcgaacagggcgaacgtcttgccgaagcccaggccgaacgtactggtgaagtcggcctgcgtcttcgtcgcgttgatcaaaagatagacgaacgggaacaggcagtacacggcgaagaccgcgcacaggacggtcaacaacgtggaacgcctcgggttgttcacgttcgcgaacccggccttcgcgctgcgcctgcgttcggcggcctcgtcggcggcgatcctcttctggcgggccttctccgccttcctggcggccttctcctgggccttgagctcggcgtcggtcaggcgaccggcggccgaagtcgttgctgcactcatcacatacgctccttcacgatcatcatcgattcctcaacacgaacagcagtagtcgtcgtcacttcatctgctccttgaggctgttgagctggacgatgtaggcgatggccatggtgatcacggccatcacgatcgccaacgcggccgcgtagttcgactggttgccggagaagctcaggttgtacgcgtacatgttcggcgtgtaatacgtggtgatcgcattaccaggaaccatgttctgcaaaatgctcggctcgttgaacagctggaacgagccgatgatgctgaagatcaccgtgatcgccaggctgccgcgcaattcgggaagcttgatgctcttcacgatctgccactccgacgcgccgtcgatgctggccgcctcgtacagggaatgcgggatggtcgacagcgagctgtagaagatgagcatgttgtagcccgtgaactcccacgtcacgatgttcccgatactggccaacaacacgctgggggcgagcacgtcgatgtccgtgcccaggaaatcgttcaacgaacccaccaggccgtacttcgcgccatacacgaaaccccagatcaacgtcgacaccaccgccggcaccgcgtacggcaggaacgtcgagatacggaagaacctcgtgccatgcagcttcatcgaatccaacgccagggccatcaaagccgacaggcacagcatgatcggcacctgcacgcacgtgaacagggccacacgaccaacactgctccagaactggccatcacccaacaggcgcgcgtagttctcgaagccgacgaacttggtgccgccgatcatctgcttcttgaagaacgaaatataaacggcgtacacaatcggcacgatgaacacgaacacgaacaccaccgcaaaaggccacatgaatttccatccacgccaatcggccttgtgcttattcacacgagccttgcccgaatgcacgggcgcagctgcgatatcggctgaagccattcccaacccctctccttcgaaggttgaccaaaatgtttgcgttatcatcataacaccatttgtaacattgtccaatcgtgttgagtaccgtgttgaattaagggtttctcagtcactctgctacaatggtcacgaagacaacgatgttatcgttaccgtaagcggccctaagataagcgttgcaaacgaaacaccgacattaatgagtcaagcgagggtgaaatgtcgaggccaacacaggtgtccatgcaagacatagcgaaagccgccggcgtttcgccacagacagtgtcccgcgtggcgaatggcagcgatgcggtgaaacccgaaacacgccagcgtgtcgaagctgcaatggaacgccttgggtatcgtccgaattatgcggcccgagccctaaagcacggccgcttccaggatatcggcgtggtgatgttcaacaccgccacgttcggcaacgcccgcatccttgattctattgtggccaacgcggccgatgacgattattcagtcaccatccagaccatgcgccacggtgcggaacgcacgctttccgccgccatcgatcgcatgcagcgtcagccggtggatggtgtcatcgtagtgctggaggaacgcatctccgatttcgtcggatacaagcctccgcgagaatttccagtcgtgctcatctgcgaatccgccgccgaccactgccccaccgttgacgccgaccagtatggctgctcgaccgctatcgtcgattacctgatgagcaaggggcacaagaccgtctaccacattgccggaccgtccacctcgcgcgccgccgaaagccgcgcccgcggttggcgagaagcgttggaacaaatgggagcacgcgtaccgagcatgtacatcggcgattggtgcgcggattcaggctaccaggccggcgtggcgttggcccacgaccccgactgcacggccatctacgccgccaacgaccaaatggcatacggcgcaatgctcgggttgcagtcagcgggcaagcgcgtgcccgaggatgtcagcatcgtgggcgtcgatgattcgctggtagatatggttccgcgcttgaacctgacgaccatgaagctgcgctttgacgacattggcgccaccgccttctccatggtccgccgtcaatgcgaaggcgagaagataccggtcggcgtcaaaaccgtaatcccgccggaactgatcgaacgcggttccgtgcgcgacatcagctgacgagcggcatgtgctggcatccactggtacctgtcagtgattcacctgccagtgatccataggcaattccgcaccgaccaatcgactcggttgtgcaatattctgcacatttccaactatgtgcagaatattgcacactttactatactgtgatatattttgcacatgattgtcatggatatcgccgaatacgcgcggcttatcaaggatgaaaggcaacgccagggcatcagtcagaccgacatggcccaacggctgggcgtgtcacgtcgctggctgatcgaatttgaacacgcccgagtccccaatcccggattctccaccattctcagcgctctgactgagcttggcttgtcgctggatgtccgcaaaaccccgcagcccgccgaactctatgaatggtgacaccatgagcgaaaacactctcaatgcatttctcggcgaagcacccatcggccagtttcgaagaacaaacgatggcagcattattttccaatatcacgattcctatcgttggtcgcaatcacccacaccaatatcgctttccatgcccattaccgcagccgaatattcaggcgacatcccgcgtaatttccttgaggccctggtcccggaatcccctcaggcccgagatgaagccatgcgattgcatcatgcccgatcgacaagcgcatttgatctgttgcaagccatcggattcgatgccaccggcgcattacggctgtccgccgacccgcacttgcccatagatgacgattcgcttattccaatcagcgattcgcagatcgcgaatcgactacgcgcagccgcccccacaggcatccagtccgcaagcgtagacgagcattggtcggtcgcgggacagcagggcaagatcgcactgaggaaccgcaatggatcatggttctccaccactggaatcgcgcggacgactcatatcatcaagcccggcataccgacccttccacaccaagcattcaacgaacacatcacccatgcgcattgtggaggcgatgggaatacccgtggcccacacctcttttcacatctttgatggggtcccagccatcatcagcgagcggtatgaccgtatagtgtccgccaatggtacggtgacggccctgcaccaagaagactttacccaagcgctgggcattccctcatcgctgaaatacgaggaacacaacggcccaacgtccaatgcatatgcggaaatgttgcgcaagcacggtctgcccggtcaggccgaaagcaatatccgagccttcaccgacggcatcctcgccagttatctcgtcggggcaacagacagccacgccaagaactactcgctattgctcgatggcgcgtccgtgcggcttgccccgctctatgaccttgcttcggtgttcccttatttggggcatggcaagcagatcataaatgccactttggcgatgaacatcggcggacgccgagatcttcttcgattgcgccgcaaacatctggaacgattcgcacagcggatgggattagatgaggaatccgtgattttacgattccacaccttggtggataggctgccggaggcattcgacagcaccgtgcaacccgctcacgacgttatcgcgagcattggtgcgcaggaattcatcgatagctatcgcaagcgcatcatgatggtgtacgacgatgcaatgagctggatggccagtcgaaagggacagtgattcggacgggcggggattggtctcgccatcccccctaagaaatcagatcttaagcggcacacgggaaacgaattcgcgcttctcgcctgttattggatcggtgaatcgtagcacacgcgccactaattgcagcggctggctgaaatcgtcgtaggggcgtgtctggatgcgcgggtagaagtcgtcgcccacgatgggcaggccgagcgaattcatgtggacgcgcaattggtgggttttgccggtgcgcgggtggagtgtgtagcggcagatggggtgatttcccggatggggaccaccctccggcgcttcgcgccacctcccgccagcgggagggaaacagaggtcgccgcgctcgatgagggtttcggcgttggccaaacccggttcctcgaatgcggccatcgtgccgtgttccttggtgatgtgcgatcggcgcagcaatgggaacgggcgtggcggttcgacctgcatgatcgtgccgaatcgcgggccgctgatcggccggcagggtgccaggcattcatagatcttgacggcctgccggttctggaacagcatctgatacgcgccgcggcaggccgaatcccgcacgaacaccaatacgccggcggtcatgcggtccaatcggtgcgctggcgtgatgtccggctcccccagccgctcacgcaatcggatcagcgcggtctgccgataccacatgccgcgtggcatggtggccagaaaatgcggcttgtccaccacgatgatccgctcgtcctcatacagcacgtccatctcaaacggaatatgaggctcgtcaatcacataccgatgtggcttactcaacggtcacggacttggcgaggttgcggggcttgtccacgtcgtagcccttgagctttgccatgtccatggcgaacagctgcagcggcaccacgtcaaccagcgggctcatcagcgttgggcaggcggggcgccagaacaccacgtcagcgtaccgttccacatccgggtcgccctgctcggccacggcgatgatgtacgcgccacgagccttgacctcctcgataccagagatcaccttggcgtgcaacacattgcggccgcgctgcggcggcacgatgaacaccacgggctcaccctcgtccaccagcgcgatcggtccatgcttgagctcgccggccgcgaagccctcggtgaacgtgtaggcgatttccttgagcttcaacgcgccctcaagcgccaccgggtagcccacgtggcggccgaggaacaagaaggagttggcgttcaccatgcgctcggcggccgcctggatggtcttgggctgggtgtcgagcacccactgaatcttgcgcggcatgtctttcagggagtcgagcatctgatgaatctcatcgcggaacatcgcgcccttgacctgcgccagatacaggcccagcaggtaggcggcggtaatctgcgccacgaacgccttggtggatgccacggcaacttccgggccggcgtgtgtgtagagcacggcgtcggattcgcgcggaatggaggcaccctgcgtgttgcagatggccagcaccttggacccctgttcgcgcgcgtggcgcagggccatcagcgtatccatggtttcgccggactgagaaatggccaccacgagcgtacgcggggtcagaatcgggtcacggtaacggaattcgtgcgcgagttcgatttccacggggatacgcacccagtgttcgatggcgtatttggctacctggccggcgtagctggcggtgccacaggccacgacgatgattttgtcgatggacttgaagtcgtgttcgtcgatacgcacttcatcaagggtgatgtcgccattcgtgtcgaagcggccaagcagggtgcgctgcactgcggcagggtcttcgtgaatctccttgtccataaaggaatcccagccgcccttttcggcggccgaagcatcccaatccacggtgtaggtcttcgggttttcgaccacgttgccgttgaaatcggcgacgatgaccttgtcggcggacacgcatacggcctgatcctggtcgacttccatggcgcgcttggtgtaggccacgaatgcggcgacgtcggaaccgaggaagttctccccctcgccaaggcccacgaccagtggcgaatcatggcgggctccgaccacgatgtccggctggcggcagtcggtggccagaatggtgaacgcgccttcaagcatgcgggccatacggcgcacagccttgaacaagtctggcttgccttcgtccgcgataatcttgtccacgatcttgccgagcagcttagcggccacctcagtgtcggtggcggaggcgaatcggtagccttcggcttgcaggtcgagacgcagctgagaggcgttttcgatgatgccgttatggatgatagccaccttgccgtccatgctggtgtgcgggtgggcattcacgtcgctcggctcgccattggtggcccagcgcgtgtggccgatgcccaccgtggcgagcggcatcggcttgcgctcgatgtcttcgaccaggttcttcaaacggccggccttcttgcgcacgaccaccttatccatgccgggcgcggtcagcgccacaccggccgagtcatagcctcggtattccagacgttccaggccttgcaggcagacctccaaaggcttgccgcatgccgtttcaatatttcccgcgtatccaacgattccacacatggctcaccagcctagcggacgattattgcgcaaagcgaatccaacccgccgcctttgcaggattggaacatgccccttcgtgaaaagcgtacgctgagttcatcagcgtacgcttttggagctgcaacaacgagccttcctacagcacgtgctgtaggcggagccgtaaagcggggagcccagtggactccccgtaggcgacgccgaagcacgacagtgctgaggtaatataacagccttcctacagcacgtgctgtaggaagtccttaaacctcggctcggtggggtggtcgatgatgtcggggccgcccttttctacgactacgccgccgtccatgaacacgatctggtcggcgacttcgcgggcgaagccgatttcgtgggtcacgcacaccatggtcatgccttccttggccaaggaacgcatgacgttgagcacttcgcccaccagttcggggtcaagggcggaggtcggctcatcgaagagcatgatctccggcttcatggccagagcacgggcaatggccacgcgctgctgctgaccacccgacagctgggaggggtaatagtccgtgcgatcgcccagaccgacgcgctgaagctcggccacggccaggtcacgggcggctttcttggactggtgctgcacgtggatcggggcttccatcacgttttccagcgcggtcatgtgcgggaacaggttgaagcgctggaacaccatgccgaggcgagagcgctgtgcggcgatctccttatcgtccagggtctgcagcatgtcctggccgtttttggtcacgtgcttgtagccgatgagttcgccgtccacctcgatggaaccgccggtcagggtttccagctggttgatcagacgcaggaacgtggacttgccggaaccggagggccccagaatcacggtcacagtaccgggcataacggttagatcgatgcccttgagcacatgcagcggcccaaacgccttgtgcacctgcacggccttgacagcaggaatcacggaaccgtcagccgccttgcgcacgaccggggcaacactggtgatgtcattcgtagtcataatcgcgctcccgccttatgcattcaatccgacaaatgtggtctggttgagcttgtccacgtcatccttcggttcaccgtcggtcttacccggcaatggcgtctgcttgcccttggtgcccaccggtcgggcatcgaagcccttgccgaagtgcgcctcgaggcgggactgcacaaccatcagaatggaggtgatcagcaggtaccagaagcaggccacgagaagcagcggaatcggcttgtagatacggttggcgatggcgttggtggcgaactgcagttcgagggtgaacggcacggcggtgaccagcgaggtggtcttcagcatgccgatggtctcgttgccggtgggcgggatgatgatgcgcatggcctgcggcagcacgatgcggcgcatgatgagcgtgcggttcatgcccaatgccttggccgcctcggtctggccggggtccacggcttcaaggccggcacgcacgatttcggacaggtaggcggcctcgttcagggccagaccaatccatgcggcgttgaatgcggtgaccaccacgttggagtcgatgctccagaactccaccgaggtgaacggaattccgaggctgatcttgggaatcagcacggcgaacagaccccagaaaatgagctgcgtgtacacaggcgtgccgcggaagaaccagatgaagaaccagctgacgccgcgcagcaccggattgatggatttgcgcatgatggcaagaatcaccgacaggatgatcgccacgaccatggagatcacggtgagctccaaggtatagcgaatgccttcaagcacgttctcgttgaacaggtacttccagacggtgggccaatccagtcgcggattggtaatcaagccttgaatgagcatcgcggcgagcagtaccacgatcactgcggccacaatcgggccggggcgcttgaccggcagcgccttgatgcgattggggatgttcagcccctcaccgtcgacttctttcttcgccataatctggttccttggatgtgttgggcagcctgaactgcaagttgcaactagcattgaaccttagtgcacgaatggggcgactgtgttacaaacagtgcgccccattcgaattttcgcgacagcttgtcgactattcgacggccgggttgatttcggccttgtccagtgcgccggattcgacgccccagtgctggaggatcttggtgtaggtgccgtcgtccatgagcttttgcatggccttctgcacggcttcggtggtctgggaatcgcccttcttgatggcgatggcgttcggcacttcatcgaagtccttgccgagctgttccagctgaccatcggtctgggcgatggcgtagccgacaaccggggaatcggcgaagaagacgtcggccttgccggtcaccacagcggtggtggcgtcggtctgctgcttggaggactggatggtgatgtctttcttgccgtccgccttgcactgcttggcggtcttgttgatggcctcttcctcgacggtgccggtctcgacggcaacgttcagaccgcacaggtcgttctcatcgacgttcttggggttgcctgtggccactgcatagcccatgcctgcggtgaagtaggagacgaagtcgacggattccatgcgctccttggtgatggtgaaggcggcgatgcccagatcgtacttggagccgatggccggaatgatcgtatcgaagttggaggagacgatttcggtctcgagaccgaagatgttgcccatggcgcgggcgagatccatgtcgtagccgatctgggtcttgccgtcggcgtcgaggaattcggccggggcgtaggaggggttggtgccgatggtgagcttgccgtccttggtcacggattcaggcagcagtgcggcgatggtgtcatccttctccacggagctgacatcgtagctggtgatggtggcggcatcggagcccttggcggaatccgtaccggcatcggccttgtcggaggtgccgcaagcggcggtggcgaacagcatggccgagctcagtgcaatggccataatggacttcagtttggtggactgcataatcgtttcttcttctctcttacgccgcttcaacggcaacgatcaacggttaagcatatttatacactacagtgcatacatatacaaaaagactcccgccgcagggcaacgggagtcttcatagtaaccgaaactactcgacggacgggttgatctcggccttgtcgacggcgccggaagagacgccccacgtgtcgaggatcttcttgtacgtgccatcatccatcagcttctggatggccttctgtacggcctcggcggtcttggaatcgcccttcttgacggccacggcctcaggggtcacaccaacgtcctcgccgagggcctcgagcgtatcaccggtctgcttgatggcgtagccggcaaccggcgtatcggcgtagaagatatcagccttaccggaagccacggcggtagtcacatcggtctgcagcttggaggactggatgtcgatggcatccttaccgtccgccttgcactgctcgttggccttgttgacttcctcttcctgagtggtaccggtctgcacagccaccttcacgccgcacaggttcgaggagtcgaccttgttcgggttgcccttctgcaccacgaacgtggaaccggccttgaagtaggtcacgaagtccacagcctccatgcgttccttggtcacggtgaaggaggagatgccgatgtcgtacttggagccgacggacgggataatcgaatcgaacgtggaggagacggtgttttccttcagtccgaacactgcggccagcgccttggacaggtcgacatcaaagccgaccggggtcttgccgtcctcggccaggaactcggccggggcataggaagtatcggtgccgacggtcagcgtgccgtcgccggccacggaatcgggcagcagtgcggcaatctcgtcgtccttctggatgctgctggtgtcgaagccttgaatcgaagtgctggacgagtccttggatgaatcgccgctcttggatgcggtgtcggtgccgtcagtcgtgccacaggccgccacggcgatcagcatggccgcgctcagggcggcggccgcagcggattgtattcccttgcttagagacattggatttcctctctccggatagtcagctgggcgggtatgtttcccagatggttccagagcgtaggagtgcaatgctacggaagcgttaatcgtgggcgaaatggcccacaacgtggacatcctactcttggctcccctccggaggggagccaaggggcgggactagtggcgcatgttggcgtagcgcatggcgcgtagggcttcacgcttgtcctgctcttcgcgcagggcctggcgtttgtcgaattccttcttgcctcgggccagtgcgatctccgccttgacgcgaccgtccttgaagtacaggctcagcggcacaatcgtgtatcccttggcctcgatgccgcgggcgagcttggtgatctgcaatcggtgcagcagcagcttgcgcttgcgcttgggcgcatggttgttccatgtgccgttcaggtattcggggatgttcgcgccctccagccacatctcgccacggcggtcgatggagatgaacgcctcggacagcgatgcgcggccttcgcgcaacgacttgacctcggtgccggtcagggccagccctgcctcgtacttgtcttcgatggcatagtcatgccgggccttcttgttctggacgatgagtttctcaccggtttccttgggcatgtctcctcctttcgtgggcaataactcgtgagtagcaactcgtgggtagcaactcgtgggtagcaacgcaacatccgacgatatcacggaccggcctcgaatacgaaaagggttcctcttcaagaggaacccttcaaccgcatatatcggccgaaccaaccggtcagtggacgaaccagtactgacccaaattggtcaaggtgcggtagtgcatgttccacggaccaccccagttcatttcggagatctggaatgtgccgtcgccatacacggcttcgactacggcaacatggccataggtgccgtcggcgccatcctggccgggcaggaaggagagtgcggcgccgacctgcggcgtgtggtccacgcgcaggccgtacgcgggggcgctgcgccaccagaagccgccattgcccagataggacggcgtgccgatgcccatctgcctgcgacgttcatacgcccagtacgtgcactggccggcggcataggcgttgccatagtcgccgttcgacgtgccttggccgccgacgctgggggcgggggcgggagcgggagccggagccggcgccggagccggagccggcgccggagcgggggtcaccggagtggacggcgtgccgccctggttaccggtatccacccggttggcggcgtcctgctgctccttctggaactgacgattgtaggaatcgacctgggaggcgatcagtacggtctgggccgcctgcttggcggattgggaatccagactgtcgaccatggaggacagttcgttgcgccgcgtctcaccctcctggcgtagcttgtccaaagcgtcacgttcgctttgcgcggtttcggcggcggtctgtgcggaagcggccttctcatcggactgggtcttgagcacagcgatctgcttttcgatggccgccaagcgctcgccacggttcttcgacgtgctcagtgaggtcgcggcggaggaagccgcattcgcctcgttgcgggacaacgcgtcccgggactgcatggagttgacgaagtcctgtgtgctggtggcacccgtcaccacgctcatcacgtcggaagcattcgagccgtgcatctcgtcacgggccagctgggccacggcggcgtgcgcgtcatcgtagtccttgccggtctgcttgatctgctcctcaagcgtctccttgtctttctgcgcggcggaaagacgtccggatgcggcatcggcctcgtcctgagcggtggcggcatcctcgttggcctgtgtgaccttggcctgcgcggcgacaatcttgttgttggtcagatcgtccagctcaagtaccttattcgccaggtcctggctggcaccggccagctgctgcttgagttcggcctcgcgctgtaccgacgcggcgtgctggttctgcgcattgatcaggtcggaataggtgtctgcctgggcaggctgtgccgagctgaacgccagacctcccacacaggctgcggcggccaccagtgccgccagtgcgggcttgatcacacgtacgttcgtcatatgtgaatagtcctttcgctcacttaagccaataccataacatgcgaacctgagaggcttgcacatgatgtcatcacatttctcgcgggtaagccggtcgcgttacgccctcaaataacgccgcaacgagatggttgaagcgatgatggacagcagtatcgcgcccacaaccaggaacggcgatatcaccagtaccgtgagctgattcacataaggaatccatgtaacggatttcgccagccagccggtgacgaacacgttgacgatagccgaaagcatcaggcacgagagcaccgagccgatcagcgaggcgatggcgccctccagaatgaacggcagacgaatcgtccagttcgaggcacccacgtacctcatgatttcggtttcggttcgtctggatgcggcggacatacgaatggtggttccggtcagcaggatggcgaccaccaccatcacgccggcgagcacagccgtaaccgccgtggctcggttgagcacggcgaacaccgggtcgaagatctggcgctgatcggtaacgtcttccacaccctccttgccagagagcacttcggagaccacctgatatttggtggggtccttgagcttgagccagagggagtcctgcatatcgtccgcggtcagcgtacggccttggaattcaccgttcgggtactgcttggtgaaggtgttgtcgtagaaatcctgcttgctgacatagtcgatgttggagaccacgtcgttgagttcatcgcgaatggttttctgcagtgccgtgatctcattggctgagggcgatttgccggaagcacagttcgcggactggctggtgccgtcgggacatagccacaccacgacctcgaccttgtcgtaccagtcgcccttggctttggtgatctgcgcctgagtaagcaccgaagcgccgatgaacaggaatgagatgaaggtgaccagcgtcagcgacagcagcatcgacaggttacgggtgaggttggcccacgtttcggacagaatgaatcgtgctcgcatgatgatcccccttactccttcgcgccctcagcgggttgatcgtcggatgtttggtctgcggcggactgctcgtcggcggactgctcgtcagcaggctgctcggcggcggactgctcgttggccggcggtgcgggcggttccggcggtgcgggcggctccggcggggccggtggctcggcggcggatgacacggacgtatcggcaaccgcggcggtcgcggcggactcgtccttgaacgggtcgaacgcctgggtgctttccagggcggcggcctgctcatccaacggaatgcccttgccccaggtcagcgtgtcttccagcggcgcgaacgtctcgccatagcggccggtgcggccggaatgcacggagttggccagacgggcgatgccttcggacggctcgtcactgccctcgatggccttggtcgccgccgccagcacatgatgggcggtgtcggacttggcttcgacttcggcatccgggaagaacagggcggaatcgtaggagccatgagcctcgtcacgcacgatcttgccgttgtgcagttcgaccacgcgcttgcgcatcgagttgacgatctcttcgttatgcgtggccatgacgatggtggtgccggtgcggttgatggcgtccagcacttccatgatgcccagcgaagtggtcgggtcgaggttgccggtgggctcgtcggccagcagaatctgcgggtggttcacgtaggcgcgggcgatggccacacgctgctgctcgccaccggagagctcatgcgggtagttcttttccttgccggtgagccccacggtattcagcaccttgggcaccaacgatttgatggtggaccgccgtgtgccgatcacctcaagggcgaacgccacgttctcccatacggttttgttattgagcagcttgtaatcctggaacacgaagcccagcgaacggcggtactgcggcacttgacggttggtgatgcgccgcagatcgttgccggccacgcgaatctcgccgttggtggcctcttcctcgcgcaacagcaggctcaagagcgtggtcttgccggagccggacgcacccacaaggaacacgaaatcaccgcgttcgatatcgaggttgatgtcgtcaagcgccggtcgggtgcctttgggatagatcttggacacattgtccagtgagatcagtgccataatgctgtttactcctcggtttcggcggcgcggcgctgttcgtggcgccagcggatgccggcctcgatgaacgcgttgatgtcgccgtcgaacacggcctgggtctggctggtttcgtagccggtgcgcaaatccttgaccatctggtaggggtgcagcacgtaggagcgcatctgatcgccccagctggccttgatgtcgccggcgagctccttcttcttcttggcctcctcctcgtggcgcagcacgagcagtcgggactggagcacggccatggcggaggcgcggttctgaatctgcgaacgctcatcctgcatggtcaccacgatgccggtgggaaggtgggtgatgcgcacggccgagtacgtggtgttcacgccctggccgccggggccggaggagcagtaggtgtccacgcggatgtccgtatccggaatgtcgatgtgatcggtggcctcgaccagcggcaccacttccacggcggcgaagctggtctggcggcggccctggttgtcgaacggggagatgcgcaccagacggtgggtgccgccttccacggacagtcggccgtaagcgtagggggcgtccacctggaaggtggcggacttgatgccggcctcttcggcgtaggaggtgtccatgaccttggccttgaagccgttacgctcgcagtagcgcaggtacatgcgcagcagcatctgcgcgaagtcggccgcgtcgacgccgccggcaccggagcggatggtcaccacggcggaacgttcgtcgtattcgccgtcaagcagggtctggatctccatctggtcgagatccttctggatctcgccgatttcgctttgcgcctcgtccagagagtcctggtcgccctcctcgtggccgagttcgacgagcgtttccacatcgtcgatgcgctgggaggcggagttcagacgcttcagctgcgattccgcggcggacagccggctggtgatcttctgggcgttttccgggtcatcccacaggcccggggccgcggcctgcgtttcgagatccttgatatcggccttgagtcggtcgacgtccagcgccttggcgatggattcgtatttggcgcgggcttcgccgatcgcctgggtaaagtcaaattctgccatcgtggtttaccttactgttgattctttgagattctttgggaagtcacgtccttgttgacagccttcgcacattcctctggcgttggcgggcattgccgcgccacacgcgcatccgcctgcaatccatgctgtcagaaggttccgggcctgccttgccgatagccggccgggcgacctcacgaatccctcgcatcagacgtgttcaactgcgggcacgaatatgcgaaggcaacgtcaaagccccgcgtaaatcgccgggatgatcagggagccgagcatggccacagctatgaccacgcacaccacacgcacgatggtgcggcggcggttctcacgctgctgtcggctgtcctgatagttactcacgagaccaatagtgtactcaccgcttacgaccgcaggacttgccgccgacgcccgccctgccggtggacccccacggccctttcctttgcgctttcagcgccgccagatggtgtttcatggccaccagcatgatgtgcgaatcctcaaggcccaagtggcgttcgttgtgggcggaatcaagcgcgccctgacgtttggcgtaggcgtcgagcgtgttgtctccgtaaggatgctcgttggtgggtaccgcgccggggtcccactgccggctcatcggcagggtatcgatgatggtgatgcgcccggcgcggtagctttccgcgtatccggcgacgttcagcatgaaccagctatgttcgaaggtggcgttatgcgccacgtacggctgctgggtaagccgcgcgagcaggccggcctgggcttggggccattcgtcgaagagtcggtacccggcctcgctgctgcggccgcgtacatcgatgccggtgagtttggcgatgagggcgttgccgagcgccgcgttttccggcggcacgccaaaagcgaggcgggactggccgtaggcgtcgccggcggcgtaatagccctgctcataggcgtatgtctcgggttcgccggccgggcgcggactggccatgttcatgaactcgaagccgacgtcgatgatgtagtcacgtgccggatcgatgccggtggtttcgatgtcgatgcccatcaccgcgtccacgtcgcggccgggcaggtaggcgtcgcgccagtcgggcttgggatggtgtccggtagcgttgccagacgcggcggcaccacccggcagagcggcaccacccggcgaagtcgcgccggagagattggcgcgggccatcgccgcatcgcccgcacgcttctggaagcgctgggccttacgtcgttcggcgcgtgcgtcaagaatcgccgccgtacggtcttggatatcgtccaaggcgactgttgtggggaacttgacatcgctgttttcggcagcagtgtttccggcagatgcgtcaccggtttcaccgctcagattcagcatgccttggtcatcgttcgatgggcggctgccggagtacggcctgagcacggcaacggtagtcctcccccgccgttcgcgactgaccacccataggtgttgctgttcgcccagatgcaacagcgtgttgatgttgtcgttgagccgacgattggcgtaggcgagcgcgcgaggcagacgataggagccgatgaatcgatcgtaatcggtcatgaatgtgctgttgcattgggcgatgattgattccagatgctcgcgtgtggcgtagtcggccttcaatgcgtcgtggatggactgtggggtggattccggtattgtgccgacgccatgcgccaggtccagagaacgcacccagtcccagtcgatggtggtgccatcggcgtccttgggcatggacgccgcccattggggaatgtctcccttggcggcgtcgaaccatgcacggtcggtcatagtgcgaaaccgagctcttcagcggcctcggtgggcaccgggtcttcgcaccagtagtcctcgaggttctcgttggtggtcagcgaacggatttcggcgcgatcgatatacaactcgccgctcaaatgatcggtttcgtgctggaagatgcgtgcgggccagccgtgcagcggctcgctgtggtgtttgccgtcttcatcatcccattcggcggtgatgtcgagccaacgcttgcgcacagcttggtatccgtcgaagctcaggcagccctcgtagaacgaggcggttttgtcgctggtgggtttgtagctcgggttgatgatcacgtggaaggggaattccgcgatttcgcgcggatcatcctcgtcgtcgcgcacgtggtcttcgaccacggcgagcgcgagccccaagccgatctgggtggcggcgagccccacgccgggtgcctccagcatggtggtgtgcatcgtatcgatgagtttggcgagcgtacgcttggaaagctggccattataggccactgtccgttggcgcaacaccggttcgccggcctgcacgatgggcaggagcttctccttgccgccggttttgatgagttgttcgacatcacggttgagttcgaggtcgactttggcgttctttccaaacattgtttttttccttagggaagggtgctacagcgcgagttcttcggcgacgatcttggcgaggcgggtgcagacttcgtcggcgtaggcttgggtggcggcctcggccatcacgcgcacgagcggttcggtgccggaggggcgcagcagcacacggccggtgtctcccagcagttcctcctcacgggccacggcatcctggatgcgcttgttggtggaggcggccttcttgtccacgttcggcacgttgatgagggtctgcggcagctgcgggaagtcggcggcgagctccttcaggctcttgccggacttgacgacctcgttgcacagggtcagtgcggtcagggtgccgtcgccggtggtggcgaattcgcggttgatcacgtggccggactgctcgccgccgagcgagtaatcgcccttgagcatttcctcaagcacgtaacgatcgcccacggcggtttccacggtcttgatgcccatatctttcagggcgagcttcagaccgaggttgctcatcacggtgaccacgagggtgtcgtggttgagcttgccttcgcgctgcttggcgcgggccagaatgcccatgatctggtcgccgttgatcatgttgccgtcttcgtccacggcgagacaacggtcggcgtcgccgtcgaaggccacgcccatcacggcatcggtggccttgaccatggcctgcagctgctcggggtgggtggaaccggcgttcttgttgatgttgtagccgtccggcgaggcgttgatcacgattacatccgcaccggcacggcgcagggcttcgggagccaccacggaagtggcgccgttggcgcagtcggccacgatcttcagtcccttgagcggcttgggctgggttttgtcatcgttcagcggagcgatggtggccaccagatgatcgatgtacaggttggtggcagtggtctggtcgtggctcacgcggcccacgccggcaccggtcgggcggtcccagtcctggccgagcacggcctcgatgtcgtcttccttctggtcgggcagcttgaagccgccgcgtgcgaagaacttgatgccgttgtcgggcatcgggttgtgggaggcggagatcacggcacccatctcaacgttgagcacgctggtcaggaacgcgatgcccggggtcgggatgatgcctgcgtcgatcacgtcgaatccgccggcggccatgcccgcagacagggcggaagccagaaaatcgccggacacacgggtgtcacgacccacgagcgcgcggcggcgcccctcaggctgatcgtcttgggtgccggcgtcgccgagcacacgcacggcggcatcgcccaaatccaacgccagacgtgcggtcaaatccctattggccagtcctcgaacaccatcggttccaaacatcttcggcatatgaagttccactccttgtatcgcgttacccgcaccatcgtagtcgttgtgctccaccctaggacccgactcggcaaaaaaccgccacggaatctgctccagaaccggaaatcagcattcaacagccgcaatggcatcacccacaaacccgcatattcatcttgttcggcggatgaatgatgagatacattcgttagcgggcatgccgggcggaccgatgcactccggcacgggaacgaagccatcgcactagtaagaacgggccggcaaacgcgcctgtaaacaatacagcggcaaatacgacgaacggaactacccagcgtacatcgataaccggcaaagcaacaccaaacagaacgacggcgaggaacacgctgagccatgcgatgaacatgcccaacggcatctcctctaccggggtggtctcggccatgaatgcaacgatctattactccgatgttgtggtcagtatgtgcggcagttgctcgtcgcggttgaggaaagaacgcgtttggcagcgaagtagcgtatgccgaccttcctcagtgcgggcgtataccatggtgcaatgcgtcaggcagcggtccaactgccggctcagtatctcggcgtcctgctggcggcgggcaaatacggacgggcaggggaagctcacgcagtaagcgcgcacgccccattccttaccgatgatgacatatcgcggattgttgatgggcgcgagtagctccttcataacgccggcgaacagcacctgctcgcgccgcgaaccgccaatcagcatgacacgcaatgccgtgaatctgcgacgtgtctggcggatcgaggaagtcgttcaccgcttcgcctgccgcgctggtttctaggcgctcaggttccgcagtcgccaaatgccagacattggccaccttatcggggtctgcgaccacgctgcggttgacggccatgctgtatgcttcactgcatcagtgtaaggcacgaatcaataggttttgagccccagatcgatggtaagaatgatgccggcgattacggcggcggcgcgcatgatgtttgcgggaatcttgcgggtgatggacggggcgatgtacccgccgatgaagcatccgatgcacagcatgatggcggccggccaatcgaccgcgccttggatgatgaataccactgaggcgctgatgttcgcgcctgtgccgatcagggttttcaatgcattgatcttgtggaatgggccgattttggcggcatcaagcacggcgagagccaaggtaccggcgcccgcgccgaagtagccggagtagatggcgaccgccgctacgcccagccatacccaccaggaatcctgactcatgggctgcacgagttgttccggcgggcggtgaggtgcggtaggggtggttgcgcgcttggcggcttcagtggcttcagtggcttcagtggcttcgatgtgcttgagttgcgcggtggcatccgcggcggcttgcttggcctgcatgcggccgcgcggattgatggcgatgatcagcgagctcagcaaaatcagcactggtgcggcaaattcaaagacactcgggtcgagtttgagcaacagaaacgcaccggccaccccgccgaatgcgccgatgaccacatacgtaatggagcgtaccgcttggcctttgagttctttgcgcgcacccatcacgccaccgatgcccgtgccgaccacgccaacggtgttagaagcgtttgccaatacaggcggaatgccgaacgcgagcagggccgggtatgagaccagtgacgatgcgcctaccgcatagcccacgaatcctgcgccgattccggccaacagaatcagcagtaatgaagttatggaaaagcccgcaatcattccccgtatccttgtcgctcatcgaccggcatattgccggccttgagcgagaatacgctgttgaggattggttgcgggttttatgttggaatgtggacgtagcttctcgcggaagcgactcccctcagtcgcctgaggcgacagctcccctcgcgcccgaggggagccagaaggaaatcagagcgcttcgttgtattcgcgaaccttgagggtgcggtgggaggatgccacgttttcgacgatcagacgcttcagggcattgtcggcggcaatgtgctcgtccagccaggcgtcaccgagcttgaccagcgtggcgggatcggcgtagcccgggtacaggccgttgagcaacgcctcggccatgtgataggtcttgttggcccagacccagtcaacggtctcgaagtacttggcggcgaacggctcggccagatcggggcgcggggtggcggagaagccacgggccacggcctcgagctgggagttggtcagctcgtcgttgtggagcgcctgatcccaagcccattccttggcctcagcggtggccatggaggcacgggcgccgtaggcgaactcgcggttttccgtggtctccttcttggcgagctgcgcgtccacgtcgtcgttggtcatctcgttgacggaggtgagcgcttggacgatggtccacgtgaagttgttgtcgatttcgaggccttcaagacgcacggtgccgtccagcagaccgtgtgcgttggcggcgaatgcggcgtcgccctcctcaccgtagcccaagtaggcggtgacgagctggaactgggtgtccgagccggcttcggcggcgttggccagagtccacagttcggcggccacgtggcgcagcacatcgtcgcggcgggcgggcgccacgtagtggtgggcggtggtgctcatgcaggccagcgcgtaacggaaggtggtggattcggtttccgtggccagaagacgcagggtcatgtccacgaagcgttcggccgggaattcgccgtcacgggtcatatcccagaaggcgagccaggtcacggcgcgggccagggcatcatcgaaacgatgcaggttggcttcggcgaatgcctgggattcggcgtcgaaacgaatcttggtgtaggtcaggtcatcgtcgttgaccagcacgaatgccgggcgcggcttgccggctgcggcctcgacgatggtggtttcgccatctacatcgagttcgaactgctcggtgcgcacgatcttgccggttgcggcgtcttcgttgtagaagccgacggccaggcgatgcgggcgcagcaccgggtgttcggccggcgcgctctgggtgagcttcagttcggcgatggtgccgtccgcgtttacggtcaggccagtggcgatcgtgttgatgccggattcctccagccacttggcgctccaggccttgagatcgcggccggaggtcttttccagttcgctcagcaggtcggccagggtggcgttggagtaggcgtgacggttcaggtagttgtggataccttcgaagaactgcgtgcggcccacgtagaatgccagctgcttcagcacggaggcgcccttggcgtaggtgatgccgtcgaagttgacgtaagtgtcgttgaggtcgttgatcggcgcgacgatcgggtgcgtggtgggcagctgatcctggcgcagcgcccagctcttctcgccggagcagaaagtggcccaagcgtcatgccattcggtggcttcggcagtggccagcgtggaggtgaattcagcgaaggactcgttgagccacaggtcgttccaccacttcatggtcacatagtcgccgaaccacatgtgcgcaagctcgtgcagcacggtcaccacacgacgctcggccagcgcgtcggtcaccttggattcgaacacgtaggagtcgcggatggtgaccatgccgatgttctccatcgcgcccgcgttgtattcgggaacgtagatctggtcgaacttggcgtacgggtagggcacgccccaggtcttggcgtagaacgcgaagcccttcttggtgatgtcgaacaggtagtcgacgtccttcgcgaaggccttggccaacgactgtcggcagtactgggccattggcacggtacggccgtcttcgttcaggtattcggtgtgccattcggcgtacgggccggcgcagatggcggtcaggtaggagctcatcaccggggtcggctcgaagtcccacagacgggtgctttcgttcggcttgtcgccgagggtgccgtcgagggtttcgcgcggatcgtcctcgatggtggcaaccggcatgttggaggtgacgatccagctgtcgggagcgagcaccttgaagtcgaaggtggccttcaggtcaggctggtcgaacacggcgtagacgcggcgagcgtccggcacctcgaactgggagtacaggtagatgttgccatcggacgggtcgaccgagcggtgcaggccctcgccagtgttggagtaacggcacctggcttcgacggtgacctcgttcttctccttgaggtcggtcagttcgatgcggttgtcttggaaggccacggccgggtccagggacttgccgttgaggtcgatggaggtcacttcgtcggcgatcaggtcgaggaaggtcgacgaaccaggcttcgcgttgaagcagatgaacgacttggaaccgaagttcttcgcgccgaccgtcaggtcaaggtcgacgtgatagtgaatcggcgcttcgataacggccttacgttcttcggcttcaatacgagtgagattagaaccgggcatgacttcaattactccttacggtcgtccctggataatccggactacttggtttctacggtttcgacgtcctgggcgatgtcggccacgacgggcacgatcatcggcttgcggtgcagctggcgcgcaacccagctgccgagcgtgcggcgcatggtctgctgcagcttgtaggtgtcgcgcgtgccctgcatcatctggtcgttgagctgttcgacgatctggtgacgaaccttgtcgaactcgctttcgtcctcggccacggcattcaggtagatcttcgggccggtgacaacctcgtgattgtcggtgtcgaccaccacgaacgcggagacgaagccctcggtgccgagaatgcggcgcttttccagctcgtcatcggtcagctcgccgacggaatcgccatcgacgtacacgtaaccacacggcacggagccgacgaccgcggccctgccgtggtacaggtcgaccacatcgccgtcttcggccaaaaccacgttctgcgggtccacgccggtcttgacggcgatcaggccgttggccaccagatggcggttttcgccgtggatcggcatggcgcacttgggcttgacgatgttgtacatgtacagcagctcgccctcgttgcagtggccggacacgtgcacggcggcgttgtcgcggttgacgaccttggcgccgagctgcacgagcttgttgatcaccttgtagacgccgtgctcattgcctggaatcagggagctggcgagaatcacggtgtcgaactcgttgatgtggatatcgcggtggttgccgtcggcgatgcggccgagtgcggccatcggttcgccctgggagccggtgcacatgaagacgagcttgtcgtcctgaatgtcgttggcctgcttcaggtccacgacggtgccttcggggatgtgcaggtagccgaggtcggcggcgatggacatgttgcgcaccatcgaacggccgacgaacacgaccttgcggccgtacttgtgggcggcgtccaccacctgctgcacacggtgcacgtgggaggagaagctggcgacgatgattttgcgggtggcctgggcgaacgcttggtcaagggccgggccgatggaggtctcgggcttgacgaagccgggcacctcggcgttggtggagtccatcatcagcaggtccacgcccttttcgccgatcttgccgaattcgacgaggtcggtgatgcggtggtcgagcggcagctggtcgagcttgatatcgcccgtgtcgatcagggagccggccggggtcttgacatagacggccagggcgtccgggatggagtgggtgacgttgacgaattcgaggtcgaagggacccaccttgagcttctcacggccggcaacctcaaccttggtggggttctggtggtgttccttgcacttggcgtccacgaaggcgagggtcagcttggagccgatcagcgggatgtccgggcgcagcttgagcaggtagggcacgccgccgatgtggtcctcgtggccgtgggtgagcaccagggcgtcgaccttgtcgagacggttcttgatgtagctgaaatcgggcaggatgagatccacgcccggctgctcctcctcggggaagagcacgccgcagtcgatgagcagcaggtgaccgttgtattcgatcacgttcatgttgcggccgatttcacccaagccgccgagcggcgtgatgcgcatggagcccttgcggtacttcggcggggcgatcagcacggcatcctgctggggtgcggtggcctgccgggtggcgttgatcttacgggacggcgtacggctgttggatccgttggcgttgcggccgcgcgcggaaccgcgacggcgagaattcgtgttcttgcttgttttcttttgttcttgtgccataacctttttgggatttctgttgtggtgcctctgctctgtcatgcaggggcggcgggctggcaacccgtatgcagcgtttcgggcttacagcagtccggcagcgcgcatgccctcttcagccttgtcaagctgagtggcgtcgggaccgatgttcggcagacgcatggtggtggaggggataacgcccttgaccttgagcgcagccttggccatgacggcctgatagccgtcgccattcagcgcgtggacaaggggggcgagctggttggcgaggcgacgggcggtagtgatatcgccgcgatcgaatgcctggacaagctgctgcatggggttggaggcgacgtgggcaatcaccgaaatgatgccgacggcaccgatggagaggaacggcaggaacaggccgtcatcgccggaataccaggcgaggccggtgcgctgctgcttctccactgcggctgcaagatcgccggtggcgtccttgacagccttgacgtgttcaagttcggccagtcggtcgtaggttccgaccttgaccttcaagccggtacggccgggaacatcgtagacgatgatcggcttttcggcggattcgtcgacggccttgtagtggccgacgataccgtcctgcgaggggcgggaatagtaaggcatgacgacgagcaccgcgtcggcacccgcttcctgagtctgttcgaccatacgcacggtgtgtgcggtgtcgttggagccggcgccggaaatcaccggaacgtcgacgacctccttgacggccctgaccagctcgaccttctcatccatatgggtgacgggcgattcgccggtggtgccattgaccaccagaccatccgcgccatcggcgacgaggtatttggcgagcttctgcgcggcggcgaaatcgacgctgccgtcggatttcatcggggtgaccatagccggcagaatgcggccgaaaggtgctgaatcaagaaggtgcatgtcatgctcgctcatagtgtttaccgtacttcccattgtggactcttatactacgtaccttgattgttgctgaatgcgtggcattatggccggagccggtggcaatgccgtgatgcgcgtcccggcgcgcttccctgcctgaaatgcgggggcaactactggtcgactgcgggtcgattacaggtcgaggaagtggtcgaggccgatggtcaggccagccggagcgtcgccggcgagcttgcgcacggcaagcaggacgccgggcatgaagctggtgcggtcgaagctgtcggcccgaatggtcagctgctcgccggcgttgccgaagagcacttcctcgtgggcgttgaggccgcgcagacgcacagcgtgcacgtggatgccgtcgaccacctggccgcgtgagccgccatcggtttcggtggcgtccggcacgggggcgagtcctgcggccttgcgcgcttcggcgatgccgtgggcggtgtggatggcagtgccggagggggcgtccaccttggtggggtggtgcagttcgatgacttcggcggattcgaagtatttcgcggccttggtggcaaagtagtcggccagtacggcggagatcgcgaagttaggtgcgatgaagaccttctgggtttcgggcttcggaccgttggcgatggcggatttgacctgggcgagtttctcgtcggtccagccggtggtgccgaccaccacgtccacgccttggccgatcagggtcagcacgttgttcaggctgacggacggcacggtgaattcgacgaccacatcggtgttgtcggtggtgatctgggtcaggtcgtcgccggcatccaatgcgagcgccagctgcgtatcctcggcgttgttcaccgcttcgaccacgtgcaagcccatgcggccctttgctccgaccaccgaaaccttgatcatgtcttcttccctgtctacccgtacctgcccggcaatgtacccgggacgttttccaatcggcaatcagcctatcaccgccaagccctcacgccaataccccgtccacagaatcaagctccctctgacgagccgaaccgtgaagtcgagctccctctgatgagccgaaccgtgaagaaaacgccggaggcgtttttaggtgagggcgaacgacagtgagcaataattcagttggctgaaagccatcattaattgcgttcgagctggacgcgaagcggactgagggagagaccccggcgaagccgccaaccatccatcgggcgtagcccgatcccgtttcacccacgccgcttggccaaggcccatccggccaacgccaatggcacggacgccagcgtgaagatgaatggcagcatcatgcccacatgagggttggaggcgtcaagcacaatgccggccacggacgagccgatcgacgtgccgaccgtgcctgcggtggttacccagctcagtccttcggtcagggattccgccggcaccagatccttgacgatgaggttgccggtggcgaacgtcggcgagacggtcaggccggcgaggatttcgaagacgcccagcaggatgagattgtccattgacagccggaagaacacgtagccaacggtcagcagcgacaggaacatcaccatatgcgcccaatgggagcctttgagttggcaagagccgaacaccagcgcgccgatgcacgagccgaccgcgaacatcgccaattgcagaccgaggaagggctcaagtcccatggatttcatggtggcggtaatggacacgtcgaaggacgtgaagctcatattgaacacgatgaacacggcgagcaacggcagtacgccggcatagagcaatacactcttgggcttggcaccgctgcgtttgagttggcgcagggtcagctggtcggcatcttcgcttgcagcggggctgccgtcatcgtgcgcggccacgctgacctgttccacgatgaccggcggctgggtggatttcagcgagaagaatatggtgccgccgatgccgcatgccacggtgggcacgaacagttgggataccggatgcacggaggtggccagccaagccgccagaatcggccccagaataaagacgatctcgtcaatggcggcttccatggcgtaggccgtgttgagcagctgttcgccatcttccacaccgcgcaacgcataggaccaacgggttcggaccaatgcgccgaatgagaactgcgtcagacccatgatgatggccagggcgaacagcagcggaatcggcacgcgcaccaacgccgcgaaggcgaaggcgagcatggccacgatctgcacggcgagcgcaagccggcccacgcgggcttggccgaaacggtcgaaggcgcgggcgtagaacggggtgacgcagctcatggccagcacataggcggcgctcatggtgccggcgatggtccaattgtcgtagagatggttgagcgccagaacgatgccgagactcatcatggaaatcggcaatcgtgccaccgcaccggacaggcagaacgccttggctccgggcagcatgaacaggcgctgatagggcgagtgggcagcggacgacttcgaaaccgcgcgagtcgtggacacaataactccttactggtgcgttgtccggcacgtgcgcccgcccacacgtgccatccgagggtagcggttccccagcaacgtcacgcggtgcgtttcaaccgcggaccggtacgtggccagtcgtcctcatcgtcggagatgccttgcgatgcataaggtctctccaccggtgaaggccgtccgatgctgtacaggtcatgagcctttgggctcagtcgttgtcagattgttcgggaatgccggagctcaactcggtaaggatttcctgtttggttttcgcacgggcgtgaagctcgcgcaagccctcgtcgggctcactgacatagtagagagtggcgtcgatactgtccaattccacaccttcgaccgctgccagcagcagtcggtacatgtcgagctgggcaagtttgcgggtgatgtcgtctggcttggtgggccgacgaccggttttccagtcgaccacggtaaagcgtgcggtggtgctggacgggtcaagtccaccgatgaataccgcatcgagtttgccattgactaggcccacgcccggcacgtccacgacaatggcacgctccgtccacgccgggatgcgcttggcccacgatgattcggccagtctgcgctgccacgccaccagcttggactcggtggcattgtcgctacttatggaagtggcggaggcggcggatacggcggatgcggattgttgagccgtgggctgtgggacagcgggctgccgtgtggatggcttgcggcattgccgctcccgttcggccaaatcggccaacatggcttcccgggaaacgaatcccgcatcctgacctgtatgcggcatacttgattcggcttcatatgccagtaccgcttcatccggcttaccggcattgatgaattgctcagcccacgcatggaactgcgtgccggcttcggccgccggagacgatattcgtggaatcggacggataatgctacgccagtagaggcgctcctcccgttcgctcatgccacctacgcgggcttgcaggcttgtcacgttctgacgtccgacggccagaatgcgttgcgccttggctttgactgcctcatcaagcgactggccgctggcggcatcggccatcaaatcggcgtcgtccaccagcaattgcgcccgttgcagcagtggaccggcgtcttggtgctgctcaagtgacgaggaatctgcggcgataacatcgatgccacgtgacagctgttcatgcactgcgtcgctgagggtagccggccacggcaattcgacagcggcatccgtctgcgtaatcggcgtctgccatgcctcccccaccacggcgtcaccgtatgccgcggcatgctctccgataaagaacccttcgggagtggcaatcgcttcgccttgcgccgagatcagcatgggcttcccggcattggcggcttgcagccgttccacacagtcctgagccgatatcgcatgttcacgggcttggagcgcgtcatgcacttcaagccagaaattggatggctgagcggcgcgagagcctttgggcaccactgacgggtcccgcccggattcgcccgtataggcgcaataggtcatcagggcatcttctcgcgcacgggtaagcgccacatacatcaatcgacgttcgtcggcatgcagccggcgcccatattcctccgcctgcgtcaaataccagccggatgcatccacttcttccacgccatcgccgaattcgcgcatggagccgaacacttcatcatcaataagctccacatcatccaaagccgccaacgatgcgatggggtcggcttccacatcggcatcatgggggaatcgcggcagaatgccggcatcggcacgcataggcacgggtacggcggtggggttggtgagccaggagtcggcggtctcatgatattcgggtgcggtccagtgaccttgctcggtgcctcccgtatggtgctcgtccagcacgatcttgagatggtcgccctgattgctggggaatccgacggcggtaagccccactaccgcaacggcatcccattccaaccctttggactggtgtacggtcatcagttccacatccaccggagcgtcagggagactggcggcttcatcctccaccgaagccagatgatccacccatgtgatgaacccatgcaacgagggagtttgctcagcggcaatctcttgcgtgtacgtatccaccaaatccacaatcgcatccataggcatatgcgccaaagcgggattggcgcggtgctgcggattatgcagcacaccggccaatacggtgtcgatgtcaagatccaacgcttctatgccggcgcgaatcacgtcgcccagtggccgcccgacggcatcatgcacctgacggagcatcaccgcggcccgggttatggcgttgcgcccgtgtgcgctcaaccgttcaagcagttttatcaggtcgccgcgtagcaatacgtctggcaggaataccgcattggccacctgatcgcggtactcacgcaccacagccgcccattcattcgctggtgtatccggttgggcaaggccggcctgcaccaatgcttggaagcgttgttccgtgttctgttcttcagcaaaacgggccaacatggtcaaatccgctgcggacatggtgaatcgtggcgtggccagcaagcgcatcagcgatcccgtatcggtgtggtcggcggccacgtgcagcaacgccatcagatcgcggatttccggacgttccaacagcgcggaatagccgaccacgaatgtggtcaatccggcctgttccaatgccgcctgatattcgggcatatgtgatttggaccgaaacagcacggcgaccggcgctttctgttcgcccggcatctgttcctgttgttcggctgcggaacggtgccgtgcgatggccgtcttgcagaaacgcactacggcgtcgatctcctgcccggccgtggcgaagcccagtactcccaatgttccttcgggggcatcaggcatggggtcgagcgatgagacatcgacctcacgcatcaatgagctggaaggacgcgacggattggagcgcaacggcagcgtgagattattggcggcttcgagcactatacggctgtttcgcctggtgacggacagcgggaatggcttgtatccggcagacaggtggaaatcttgctggaacatacggaatgcaccagggctggcaccacgccatgcgtaaatcgactggaacggatcacccaccgcgttgacggcggacctctgtgacgcatccacgtggaacagtgctgccagcagagcggcctgcgtggtggaggtgtcctgatattcgtcgagcagcacgtggctgtacctgcggcgcgtacgctctccgatggaggggaagcgctcgataagctgatacgcggcaatggtgaagtcggagaattcggccatattgcgttcccgcttggcttgggcataggcctccaccagctggagcagaatatcgcgtttgcgtgtggtctccagcagcgcaccgcaatgataggtgcagcgggcgtgcaaatgttcggcacggtcatcgagcttggcttgccagctggcgtcggtatctttcttcagtcgtttgatcttggggattttcggctcgtcctcgggcatgggttcgtctgcaacggcttgttgcaatcgattgatgaatgccgaatcccattgccgtactcgattgatcgcatcatcgaagctggtgcagccggcaccgatcatggcactgccaatggcatccgacaacgccagaacacggttcgccaaactggagaaggcgccaaaatcctcactgaacgccagatccatgtgactgtcgatgacttcggtggccagttgaagcgctccggctgcgctcaatggttgcgtgttctgatcgaatccgacaagcagtccatattggcgcacgatggtctggaagaaggcgtcatacgtgaaaatggccggcttgaggaatgcccgatcagacaccgtggcggtcgtagagcccgccatatcaccggccactgcggcggagacgcgttccagcagttcgcctgcggccttgcgtgtgaaggtcaggccaaggatgcgttcaggtgccacacctcgattgataagcgcgatgatgcgttgggtcatcgtaaaggttttgccggaaccggcaccggcaaccaccaatacgtcagcatcgactggcgcatcgatgatggcggcctgttccgcactgggagtgaacgtgctcatgcttgcctcgtttcgaaaatcgtgtcgatctggcctgcacaggcagggcagacgttcttcatacggcagaatccgatatgggtgtcttgcggatgggcctcgatgatggctgatctgctggccgccgcggcatagaatacgcgggcgatcatggtcagcgaccataacgtctgcgtaccggcgagcgcggcgaattgcgcccacgcttcggcactcacaccttcgggaggagtagccggatctatggcgggtatgtcgaagaaacggttggggtctttgtaccagtatcggggcgtgaacggttcggcattcaacgagccatcagtgaacagcggcggctggaaggcaccttccggagcgtagcttctggctggtgccgcattctgcccgacatggaatagcacgctttggctgatatgcggcattgcggcaagtgccttggcaccgcgcggcccgtcttcggggaacacgaggccaagctgatagcacacgagctgcaaatcattgaaaatctgtttgaccgtgggcgttctgcctgttttgtagtcaatgaggcgaatgcattcgccgccgtctgcgagtacgcgggtttccatacggtcgatgcgcccggacagtctcacggtcagatgctcgtccatgccttccggccaccctccgaccagtgctcccatcagacggaccagcgtgttccgaccgattgggtgcaggccgggcacggcattgtatgcgtcgagtatgtcacgcacatcgaatcgtgcggcaaactcccgttcgcattcggcaccggccaatgcgccaatgctgaagttgctggagttcttgccaagatacgtttccggatcggcatcgctgcgcacaaagtaatcggcgatgttgcgcagggtatccgccgcggactcgtccttacgggtggcctcatagcggttccgggtgtcggctatggcattcggatcaggacgtttgctctgatagatggcattaagccgtgccgagacagcctcgatgcgacgttccgtgccggccgtggagtccaagcccagtgcggccaacgcctgggcattgtgggaaagatggtccagcccttcctcgctgccttgctgcgcaaccgcatggatgagggttccgaaactggtggccacggagctggggcgaggaccggcgaaccggttctccagcatccagcacaccgggcacgcccataggctgtcgaccgccgatggagataaggtgaccatgggcgcggcctgcgcatccgtcttgcctttccctgtttggataccgtcaggctgtacaccaccagatgacgcgctgtcggatgaggcactgtcagatgaggtatcgccagatgacgcaccgccagatgacgcaccgccagatgacgcgctatccgattgggccggcgattccacaaacgcccagctctgcggatttgcggcgcgcacaccatgctctaacaggagtgccaacgcaatcgcggcgtcctttgcggcagcctgctgcggttgagcagtggccagaaccgcgcgggcggcgctgaccaacccacgtgggtcggcgtccaatccggccagatcatattcggcgaatcccgcatgtgcccccactgtggtgaaaggcgcctgttgccggttgcgcggatagtattccggcagatacccgaagagaaagtccgaggggctcatgctgtcgttccataccgcgctgatcatgattcgccgtgcacgggtcagcacgaccaggaaactcttcttctcgcccgacaatacagccgcgaaccgcggatcatgcccggttttgtcgctttcttcaagcgctcccctcagcacgagctcggcaaggtcttcaccaccgaacatggtgttgcgcccggcgaggttcggccacacgtcttgctggaccaccggtatccacgcatattcccagtggcgtccggccgcgcctgccggcgtagtcaatgtcaccgcgtcttccaccggtcctatgtgggccaaggaatcggcctgcacttccatgccccgaacctgtgccatgaatgacgtgatgtctcgactggcggtggaatcatcggcgaactggaacaggcgcattgccgcgtccagccggtcattggccgtacgcccctctgccgtgttgaataatgccgcacgctgccagaccggtgccagaccggtggcgttccacgcaacagacagcgcatagcgcggctgtacgcgctggcttgccggcagccgctccaagccggaagcaacgctgcccaccagatgccacaggttcgcaaaagcgcgggcctgagggtcgttgccgagcaccgcgtggatggatgcgagcgcagcctgcgccggcgcggcggcatcatcaatggcaagcatcacgtacagcgcgtcaacgccaaaggccaagtcatcgccggacggttcaccgagtatttcgacagacactggcaacgaagtcactgacgacgaaaccgctgacgtcgaaaccactgacgaggatgtttcacgacctgtttcacgccgtgtttcatggtatgtttcacgcaatgtttcccatgccgtcgtcagagaggtcagcatggcatcatccgtggcgagatgcgccagcgactccaacgaccccatggccgattcgatcggcgcaagccttgcgggacgcccctgaccgggtttggccccggcactcaccaacgggccgttcatcaacgtggccactctagtccttatatatgccgcgcaggaagccaacgtcatctggcattccgccatcccctcggcacgcaatcgggcaagctccacaagcgcgaacaatccctgcacgaaagtctcgtccttcaaaggacgggtgaccgacgaataccgcaccggtacaccatctcggcgcagtcgttcgccgaacagccgcacggcggcattgtcgtgggtgatgaccgccatgtcgttccaccgaatatgccggtcaagatgcgcccgcttgatgcgccagaccacatcatccagctcctcacgtgaggatcggtacaggccggcggtcaccgtgccgtccgcctgataattcgctgcatcgactccgcccagtatggcggtcagcttgccgggacgctcggccggaggcagcggctcgtcttccggcgagggaatcgacagcgaaatacgagacgcgatcacatcagccatcgtcatgtgcgactgatcagcgacggcactgccgccaaccagctgttcttccttggccttcagccgcccttccacggcacggcgcatcagatattccggatacgatccgcggaaggtctgcaccgattcatccgggttgccgaccagcaccaacttgacgccggcattccccaactcctccaagaagcgcatgccggccagcgtggtgtcttgaacatcatccacaaccagcagccggggcaagcccaacgcctccacacacataggccggtcggaatcatccgcgtgatcggcggcgaatgcctcacgcaccacacgagcgcctgccaccagcaaatacgaggcatccaaacggtattgccccggatataccgcgctttgggctgcaatatattcacggcgcaacgcgaaagccaaacgccattgcaccgacaatcgcgcgtcctccgtcacggcgtccaagagacgtggctcttcgtgaacgcctacaccgagctcatccaatcgggccagcatatcgcgcaactggctgataaacgcatctgaaatacctcgcgtgaacctatccgcgctggtcgagccgcctgccgacgtcggagacggcgaatccgacccttgttgcgggaggcttgattgtgcggaagcggcagagccgggcatctcgccggcaccggcatcgcgtatgagtctcgcccagtcatcctgggcaaagtagacgcgtagcaaatcacaggtgccgcaatcatctcccgctacggcatggcgcagatgcacggccatgacttgacgcagcaaagcatcctgttccgcaccgttcagcaatcgaggcgacggcaatccagttccctcgcgcgaagccgatatggcccggaatgccacggcacccagcgtggtgaccggcctggcctgcacggaaaacccgagctcacgaatcacccgattgcccaatgcgtcggcggccacacggccggatacggccatcaccgcctgcgtgccaccgtagcggcgcagccccgccatcaacaccgataaggcgaattcagttttgccgcttccaggcgtgccgacaatcagcctcgccgctccatcacggtcgatgccgtccagcactgttccaggttcaagtctcgtcatcatggctccagcctaaacccgaccgtcacagagggaaaaattttaccgaacccgacgaagaatcgtacccttgacggtatcctgtagaacgaatgcagggagagcgcattttccaaggagggagggaacagatggacaacattccgatgagaccgccgaagctgcccggatatgatttcgtccagatgttgggaagcggtgccaccgccacggtgtacctatataaccagcgtatgcccgcacgcccggtggcggtaaaggccagcgccaaaacccttgacccacgggccgctgccctgttcaaccgcgaggccaacttcatggccaagctgtcatcccacccgtacattctgccggtatatggtgccggcgtcacctccgatggccatggctacatcgtcatcgaatatgcgccgggcggcacctacaacagcatcatgaaggcccggtccatgacctgcgagcaggtactcgacctcggcatcaagctgtcaagcgcgctgttcaccgcgcatcgcagcaatatcatccatcacgacatcaagcccagcaacattctcatcacctcgcagggcttgcctgttctgggtgatttcggtatctccaccgatgtgtatgaccgcaccgaaaccggattctcgccgccgtgggcaccgcctgaggtgcttcagcatctgaccaatggttcggaagccgccgacatctattcactggcggccaccctgtacgccatgttcgtcggctgctcgccattccagcacgattatcacccgcgttcgcaatcggaactgatttcgctgatcgtcaaccagccattgcctcgcctcaaccgccccgacgtgccggccgatgtggaagcggtgctgcgccgggccctgaacaaggaccccgaccagcggtactactccgcgttggagttcgcacgtgccatgcagcgtgtgcaattcgcatatttcgggcatgccactcccgttaccgtggaagggatgccggcctatcccaaagacatcgagcgtcggcgccgggccacggaccagcgagatcagatcacccgttcgtcacggcgatgggtcaaaccggtgggtattaccgtcggtatacttgcggcgatcaccgcagcggcactgatattcgccttcgtggtcgttccccgcatggacagcgccaccggatcagataccaaacaggtggcgacgcccggcaccaaggatgatgacaacaaccgcaataatcaggatgacgtgatcaccgataccgcgaacgcccagattccttccccggagaatctgaacggcacctatgcggcggatgggtcatccgtgacgttcacctggacgaatccagacccgcaaagcggtgatacctatgcgtgggccatagtgcagggcagcaataccgaccagagcgcgcaaaccgtcacaacgtcagatcccacggtgaccgtcaacgcgcaggaaggctcgcagacctgcattcaggtgtccattgtgcgcaagaaccgccagatgtccgtcagccccgccatcgcctgtgcggccaagccgcaagaatgatccgctcgccactgccgggcatgccaccctggcattgcgtatcgcatcagacgtgcgcccagcagcggcgaattcaccaaatggacaacaggaacggcaggtattggaaccgtaaagcgttgtcattacaccagcaaccagagaaaacaggggtcagggagttcagatggccacatcgtcccagtcatacgatcgtcgccgacgcatcagcgcggctttgcgccgccttatgccctccggagggcatacgtggacggttcccgtaatcacgctcctgctgcttctgggacttgttgccggcgcggtgatcatgagcaccgtcacgcgccgccatgtgcaactggacgatggcaccgtatgggtcacttcgctgaaaaaccagaaggccgcacgattcaacgtaaagaacaaggaggccgacgccggcgtctcctcctccgccccacgattcgacatcgcacagcataatggcgacaccatcctgaccgaaacgaccaaagcctccaccatcaaggcatccacggtcagcaccggtgtcaagaccgacatcaaagccaacaccaccactgtggtcggcggggataccgcagccctgatcaacgagaagaccggcaatgtgtggaccggcttgtcggaaaaccttgattccgtgacccccaccacttccgatccgaaaataaagctgggcgagggcgggcgcatcgcagtaacccacgatggcaaggtctacggataccgtccatccgacggtatggtgctgcgtcttgacaatcccagcagcgccaaggccaaaaccctcgaatcgctgaccgacggcaagcagcagaccgttgaaagctttaccgtcatcgggagcacgccggtaatcgcaaccggcaaaaccgtcatattcaagggcggccgcgtcgatgtcgacacgaccggcaccctcacccttcaggagcctcccaccgatgacatacagtccgattgggtggccgcggcatcaccgagaggccttgcgcttatcccgttgaagtccaatgccaaggcgaatttcatagccaacgggggcaaggcgaatccagcacgaccggtatcgtccaagggctgcgtgtactcggcttggagccagaaggccagcaactacattcgcgcctgctcccccacggataccagcgtcaagccgcaaaccctcgaatccgtcaatactacttccgaattggtgttccgcaccaaccatcgccttgtggtgctcaacgacacggttaacggcaatgtgtggaaccctgaggattccaccaaagtcatcaaaatacagtggaacaaaatacagaccgagcagaccgagaaagaacagcagaacaacgactcggccaacaaccaccacgacttctccaagacctgttccgcacaatccggccaaatcaaagccgaggatgatgaaatcggcgcacgagccggttcggaacagattctcgacgcgctgcgcaatgacgagcagaccgattgttccgtactgaaaatcaccaaggttggcgcaccaaacaacaaagacgtcaccatttcgccgatttacgacggccggtatctgcaactcgatgcctccgccgcatccgcaggcaccgttacctttacttacgatatttccgatggtcgcggccagacctcttccgccacggtgaccgtaaccctgaatgatggaggcaaccacgctcccgtacagttcgacactcctcccgagatcgatgtggagcagggagccagttataccgccaatgcgctgagcagcttcaacgatccggatggagacccgctcactctggtctccgctgtggcccagaacaccgaccaggtgcaggtgtccacccgagccgacggccagcttacgttcaacaccggtgcgctggcgtcgggacgtgtgggcgtcgaggtcaccgtctccgacggcacggcaaccggcaccggcatggtgtatttctcggtcaagcccgcgaacaccttggccgcggtcatcgacccggtagcgaaaaccaccgttcccaacacggataccgtcgtcaagctgtcctcttatgtgcatggcacttccttgcagccggcacaactgactcaggtggatacgcccaacggcgcttcgacgaccaccaatgcggcggatatgtcgttgacgttcaaggccaccaatcccggcacctattatgtgccctacatcattactcaaggttcgattccggccaccggattggctcgagtcgaggtgcagcctgccaccggcgaggccgccaaaccggttgccgccaacgatgtcgccctgcttggcgcggataataccgccattgtggagccgctcaccaatgacgtcgatccgatgggcggtgtgctgtccgtcaccacggtgagcgcaccggccgactccggcatcaaggttggtctcgtcagccataagcgcgtgtatatcaccgcgcgtcaggtgcccacgaagcccgtcgcccttacctacaccgtggccaacgcctccggaaccgccaagggcaccatcgtgttgcagccgccggctctggccacctcgaattcagtgcccaaggccagcaatatcaatgcccaggtgcgtaccgacggcatcgtgtccgtggatgtgcttgaccatgtggcctactcggatggcaccacggtcaaactcaagaacaacctgcaatacgacaaggggacgttcaagggtctggccttcgtctctggagacacggtccgctaccaagcatccagcgagaccggcaacttccccatcacctatacggttgaagacaatctgggtaatgtggcttccgccaatatcaccattaccgtgcataagagcgacgcagcgagcaaggccgcgccaaccccgcatgacgccgaagcgcaggttgccgccgggcagaaggtccgcatccccatcacactgaccggcatagacacggatggcgacgacgatcagctgttgggtctgggcaacaaggcacccacgctgggccgcatatccgaagtcggttccgactacttggtctatgaagcgtatccggattcgtccggcaccgacaccttctcctatgccgtggaggattggaccggtcagcgcgcacaggcgcagatccgcgtgggcgtattccaaggatcgtccgactccggcgtatacgccagggatgacgaaatcacgttgaggcccaatacggccgcaaccgtgccggtcgcgcagaatgacatctccggcgacaacaccaatctgaccgtcgacaagcatgtcgaggtccaaggtctcgacggggtgagcgtgaaagacaatatgatctccttcaccacgcccggcagcgccaccaccgactatatcgcctacacggtcaaagacaaggccggcttgtccgatacggccaccctcacggtaaacgtggatccgagtgccgccatcgagccgcctaccgcctacgactatcgtgtgccgtccgccgccaccatcgataagaagtccgtggatgtggatgtttcccagtggatcgccaatccttccggcacagccaatgagctcaaggtcggcgtgcatccctccgccagcgctcacgctcacgtcaagggcggcgagcattcgaccaccatcaccgtcgacctgacgtcacaggcgcgagccgtgccttacacggtgaccaatacgaaatacaacatcacctccaccgcgttcatccaggtaccggcctatggtgtctttccgcccacgctgcgtcccaaggcaccggaattgaaggtcaactcgcgcgagaccattgaaatcaacatcaatgactatgtccgcgtcggcgccggcaaggaaccgtatatcgaaagcgctgattccgtcagcgccaccaaggcttccaactccgatttctacgtgaacgacaagaccctgaagttcactgcggcaaaagactacgcaggccccgcctccattacctttaccgctgtggatggcaagcagggatcggataagaccaagatcatcaattccgcagtgatcactctccagatcacggtgataggccgcgatgtgccgccgcccacgttctcgtcctccactattgatgtcgaggcgggcgcggaccccaagaccgttgatctgacggcgctcacccatgcaccgtccggcgtgtatgacgacgaaaagcaatacacgtattccggtggaagctcatcatccaggcaaatcaccgcaaacctgtcccgttccggtagcttgcaggtttccgccaccaaggatgccgctcctggcaccaccgcgtccattcccgtgcaaatcgcatacggcgcgggcaccgtgaatgccggtgtgaccgtgcgcgtagtgtcttcgacccgtccgctgacacgcgtcggcaacaagacgttgaagatcaaggccggtgccagcgatgccgtgaacgtgcttaccggcgcgtacaatccgttccccgattcctcgctgaccgtcatcagctgcaaggcggatgacgccgccaaactcaccatcgccggatgcgatgcctccggaaacatcaccatcgccgtcgcatccgatgtaggtgcttccacgaacaccgtgctcgtcaccgtgcaagacggcaccaagtccaaggatcgtgaagtcaccgcatcgattaccgtgtccgtgatcgacaagcccgagccgccactgctctcccccgtagccggggaaccgcaggacagcgcggtcagcctcacatggacgcccggtgccgccaatggcagcccgatcaccaactacaaggtcagttggaccggtgccgtcaccggagagaaggattgcggtaccgtcacctcatgccaggtcactggtctgaagaacggcaaaacctattccttcaccgtcgccgcgcgaaatgacgtcggctggtccaagccgtccaccgccgtcgaagccacaccggacaaggtgccgtccgctcccaccgatgttacggtcacaggtggcaataaaaccgccaaggtgacgtggaaagcgccgagcggtgatttcagcgccgtcgacaactattcagtgaccgtcaccggtgcaggtgctccgcagaccaaggaaaccggcaatacggccaccgagctgtcgtttacgttcaacaacaacgacatttccgatggcaccgccattacggcgaccgtcaaagcccataacaaaatcaattggagtgccgagtccgccgcatcgccgtcagagaagatctggggagacccggatgcgccgaacattgcgttgtcgaacgacgacaccacggtaacggcgaaagtcactctcggcaataaccgcaatgccggctgccggcgaatttccttgggaggagacgtcaaggacaccatcgattgcagtgacagtggcgctacgttcgatatcaatgagaacgatttgaacacccgggaaatcaccgtaacggccaccgtggtgccgcagcgcgatgcttcctccggcacgggcaagagcagctttgtcccgcagtacaaggtccagccgcccactgacgtctacaccaccggatccggcagtacatgcaccgtgcattggaccaagcagggacatgcgcagtcctacagcgtgactgccgatggcatcgattccggtacagctactaaccggaactcactcgacttccgaatgagtccttgggccaaatgcaacaccgcatcggtgcaacaggtgttcaacggcgctaccagcgacgccgtcaccggaggcccgcacaatggcgctccttacacctatgagaagaaggctgtaatcaacaaaccgcaggagctgcgctggtcagacaacgctcacgtcattaacgtcaccggcggttcggttgatgtctatggcaagtcggccactgtacaaatcatcatcaatggccaaccgttcacgtggaactccggccagccattggatgtcaccgacttggccgtggccgccgatggcaactacgcgtggagcgtcaaagtcaccggcgggccgggatactccggtctcgacaacactgcggacggaggcagcgtcgcgggcacacgtccctctgactcctcggaggggaccaagtcgctcaaatccggtaccgatgtcaccactttggccaagaacccctggattcttggtttcggcaataccccaatatcgtcaaccaccattcacaagcagtaggagaacatccatgagcgagaacatcgatgacgcgacgcagttgtctgacacgacccgtctgtccgacagcacgcagctatccgacagcacgcacttgtccgacgccacgcacctggcatccgcaccacacaccggcacgaccccaagcaccgagtcggcgccgcagtccgttgcgctgcctaacctgccgcagcggccgtcacaagcgccgtcagaaaagccgtctcctactactgatgccgcctccattcctgcgggcgatgacagcaccgtgctcaagccgcgcaagggatcgacgccagccatcccgcagcaggccaccgcgcaatcccagccgcaatcacagccgcagcgtcagtcgagcaaagccgcgcaagcagccgcatcggcactgcccgccagcatcaattccggactactgccccagcccacggctcaggtccgggatttccagcagtccttcaatgcgctggtcgaaaatgtctccaaggtggttatcggcaagaccatccctatcaagcaatgcgtcaccgcactgatggtcggtggccatattctgcttgaagacaaccccggcaccggtaagacccagttggcccgaggcttggccaattccatttccaccggtttcaagcgtgttcagttcacgcccgatctgctgccttcggatgtggtgggtgtgactttctacgatcagaagcgcggagaatttgagttccgcgaaggcccgattttcgcctccatcgtgctggccgatgagatcaaccgtgcatcgccgaagacgcagtccgcacttctggaggttatggaagagcagaaagtcaccgttgacggcgtcacacatgatgtgccgcagccgtttatcgtgatcgcaacccagaaccccatcgagcagctcggtacctataagctgcctgaggcgcagatggaccgattccttatcaagacgtcaatcggctacccgggccatgatgtgtccgtcgatatcctcaagcaggtcgatatcaccgaccgtgcgcagaccatttccccggtgctgagcggtgacgatgtcatgcggctgcgtcaggtggccaccgaaatctatgtggatgatgcgattcgtgaatacatcgtcaggctcgtcgaggcgacccgccacaacgagaagatcacggtcggctcctccatgcgtggcgctttggcactgacccgatgcgcccgtatctgggccgcggccgatggccgtgcctacgtggtgccggatgacgtcaaggaccttgcagtggccgtgctcgcacaccgtatcacgctgactccggaagccaccttcgatggcgcgactccggaaagcctgatcgcacaggtgctcgaagacgttccctcccccaccatcggttcctgatagggcccggaaaggtatccgaccatggcatctacatccgccgcattacgccgtcgccggcgcgctgaacgcatgttcaagcgcgcggtaagacgcatcagacggttcttcgcatcctacgtctcgcccttgggctgggcggtaacgggcgcaggcatcgcatgccttattgcgttcccgtttctgggctggtatgagctgctcgtattcggcatcgtggcgatggtgatgatgctcgcggcaatcgtgctttccctcggcaacacacgcttccacgcgtccatcgtcgtatccaatcatcgcgtgaccgtgggagacaccgtatccgttatcgtcggcatcgacaacaccggcagaacgccgacgaccacggcacgcggatatctgccaatcggcgatgcgcatgaacgattcaacatccccatgctggctcccgggcaatccaagcaaaccgatgtggagttccgtaccgtatcgcgcgcaatactgcccatcggcccattgcgcatccgcaagggagacccgttcggtctggtgcgtcacgaaaaggagctggccgaccgcatcaccgtattcatccaccctcgtaccgtgcgtctcgatactctgaatgccggcgtgccccgcgacctggaaggccaaccatccggccagatcgtggatgatgatctcgacttctacggattgcgcgaatacgagccgggcgacgacgtgcgtaacgtccactggctgagctccgcgaaaaccggcacgttgatgattcgccaatatgaggccacgcgccgcaccgacacctcggtgaccatcagcgtgaacccggacgaatacgtcaacggcgaggaattcgagatggcggtgtccatccactcctccatcggcgtcaaatgcctgctgcaggatcgtccattgttctgccacgcgggcaacgcgcacggccagccgcgcaacgccatggagttcctcgacaacgccagtgccatagagcctgatcgtgaggataatccgaatctcgccgagggcacgctgaagcacagtcctgatgcttcgttctattttttcactgttggatcgctgaaagacatcgagcaaatcaagcgcatgaccttggccttgccccgatcggccagctgcgtggtattgcaggccagcgccggcgccaatcgcggcatcagaagattcgccaacttcacattggccaccatcggcgacctcgatgatctcccgctgatcatgggggtgctcgcatgaccttcgaccagtccagtatcaccaataccaataccgctgcgtacgccggatcgagcggcacatacaccggcacttcctccggcacgtacaccgggacctccaccaccaccggctcctgggccgactccacacattcggttatctggatgaccagaggcaatgtgcttcgcggcatgggcctcagtcgccagccgtggggcaaacgaatcgccagcctcgtactcatagcggcgatgatgttgctggcgcaagccaatctcatcgacgtgtacggcggcgtggccacttgggcgattgccgctgtaccggccaccttgctgggcgcgatcatcgctctggcgggcatgttgccggcgttgcgactgtggtggcaaatcgtgtttctggcgtttgcccaattcatcatcggcccggtggtaacgctgagttccactacgtcccattacgtgattcccaccttgaagaccttgagttcaggttgggaaatgacgtttggctcgttcaagtacattatttccgtcgatccgcctctgggcacgcaagacggcgtgctgatggcggtatggaccatcggcctgtggcttacgttcttcaccggcgtgtttgccattaatgccaacgcatggttgtctctggtgggagtgctgccccttgcggcggccgtggccgtatgtgccctgctgggcacagacagcggctggcaacgcgccatctgcggtattgcctttgccttgctgctgattatctggctgtcttggcgtcttgaactgctggaaggggggcgctggatatccgcgctgatcatcgtcgtgctcgctgccggccttgctttcgggggcacgttgctggtgccacaggaccgtttcgtgctgcgtgaccgctacgatccgccgttaagcccctacgattacaccagcccgctcagcggcatgcgatcctatatcaaggaccacaaaaaagacgtgttgctgaccgttcataatctgccggccggaacaccggtcaaacttgcggtgatggatcgattcgatggcacagtatggaacctgtccgattcttccgaagccacggactcctcgaattatcatcgcgtgggcaccacgatcaaggcggatgagcagggtaaatccttcactgcgaccttcaccgtcgatcaggaactgaccgacacctggctgccgctggcgggagcggccactggcgtgagcttcgccaacgatgccgacaacggcaatgacacgttttactacaacacggataccgattccgccattattcccgccggcacgcgtaaaggcctcacctataccgaatccggcattatcgcccgcaagcccaccgataagcagatcagcagtgcggctgcggcccgcatcacccaaccagaagcccaggatgttcccgattcggccagcaaactggccacgtccattgccggcgggcagtcctcgggcggtgccgcagccacggcgttggctgacacattgaaagactccggatggttctctcatggacttgaaggcgactatccctccgatgccggccatggcaactaccgcatcaacaagctgctggcaggcacggccatggtgggcgactccgagcaatatgcctccgccatggcactgatggctcgtgatctgggactgccctcccgtgtggtcctgggcttcctgccgaaaaacgaggatggcgaaatcaccgatgcccgcacggagaagacctcgggcaatggcaccaaaatcgaattcaccggcaacgatgtcaccgcttgggtggaaatcaaattgcagggcctgggatgggtggcgttctatccgacgcccaaggagaccaagatgcctgatgaaaaccagaacctgacgccgccgaatccgcagacgctggtccggcaaccaccagtgccgttgaccgatccgctgcgcgatcagacgcaagccaagggccaaagctcattggccggcgccgacgccgatgattcgccgaccaacctgttctgggcgcggttctggcgagtgacccgcaaggtggccctgtacggcagcccattgtggaccctactcatcgcctgcggtctgattctgatgttcaaggccatactgctggcacgagcgcggcggcatggcagtccgaaagcccgtgtggcagcaggttggaatgccatacgcatgcttgccgagcaaagcggcatcacagccaagggcactcgtcgagatcaggccggtgccatcgcccgtcaactcggcacagatgaccaggctttgatccagcttggccgggaagccgactacgccacgttctcggggcaagacattgaatcgggccaagccaccacatattggacaggagtcgaccaattacgcaaggcaatgctcgcttctttgccgcgtttcaggaggatacgtacacgactttccctgaaaagcgtggctatactgtcaaatgggcacgcagcaaagccgcacacgacgcatgtcaagcgcacgcgtaagaaggggaaggcgtcatgaccacaggctccatccgtatcgcgatgaccagtgacgtgggtcttaggcgcaaaaacaaccaagacaccggattcgcgcaacaaggcgtgttcatggtctgtgacggcatgggcggcggcaaaggcggcgagcaggcaagccagttggctgcccagcatttcgcacaattggccgccatgccttcacgcacccgtcaggatatcgacgacaccttggcacgggcccagcacgacattctcgatctgggagaccgccttggcggcgtggccggcacaacctgctccggtttggtactgccccaagatcatgcggattccgccagcgcccgcagcgctgctttgttcagtgacgccgatgatcaggacttctcggaccagacctatgtggtcaatgtcggcgattcccgcacctaccatctcagtccgttggcgcatgccgatgctcccgccacggatatcattcccgtgtgggacgccgcttcgctgacccgcatcacgcgagaccattcccagcgccaagaagccatcgattccgggcagatgttgccggaagaggcggaggcgaccattccacgcaacatcatcacccaatgtctgggtgatccggatggcatcatgcccgacgtatatgtcgccgatctgaccggccgcttcatcatctgttcggatggattgcatggcgaggtgccggacgaacagatcgcggccatcgccgcggcgcattccagtccgcaggaggccgtggacgccttggtggcggccgctcttgatgcgggcggaaccgacaatatcactgtgattgtggccgatatgccattgaccgaacccgaacatcatgcgttcagcgcattcaggctggacgaaggtgaggatatcggcgccattgaagacgcaacactacaaacactacggaccatacgttcggcataaccgagcgaacataaggaggtaatcccatggttgattatgatgctgcggtcgctgccgttcaggatccgaacgcggatccgattctgctggcaaaaatcgcctacgagaatccggaattcggtgccaatgtcgccgtgaatccgcgctgttatcccggcttgaagcgttggatcgccgagttcggtgacgatcgcgcccgcgagaccctggcgcaatacgggttcactgccgaggcattcggcggcccggttcaggatcagaaagccacggcacaggcggcccagcagcccgccgccgaacaggctcagcagcccgcggctcaggcggcattcgaggagcctgtggccaccaatccttacggtttcaccgccgaacaggccctgaccaccaccgaccagatgcaaatcgcccagattgcccagtacgcgcctgaactacgcgcctgcatcgcacgtaatcccaacacctatccggcactgatcgaatggctgggccagctcggcgacccggcaatcaacgccgctctggcttcccgtcagtgaaaggacggcatcatcatggccaaacttccctaccctccagcacctgaactgggttggtattctgacgatccggtggaaggcaccccggattccgcagttggcacagccgaaccgcagaacgactacgggcagcccagtaccgcggaagcggcaaccaataccgcttttaccgcagagcctgccgccacggccgccgccgctgagcccgctgccaccgctccggcagacaccacaccgcacgccgccgaaaacgacatcgaggattgggacagcaccgtgctctcctcctcgttcacgtccaaggcaccgaagaagacgtacctgctgcataacgatgtcaccggccagaccatcgtgatcgataagagcacgttgctgggccgcaagccttccatggatgtgccgcagggtgccaaggcggtgcgtatcgtagacccgacccgcaccacatcccgcaaccatgccgccatcagcatcgacaccgatggcgcgctgtggatcgaggactacggctcgttgaacggcacctacatcatcaccaatggccaagagacacaagtcaccaagggcacaccgctcaagctcagcgcgcctgccacggtgcgtatcggagaccagttcttccagttcaccgaaaaacaggcttgagtaatcaagcaacgagcggctgcctgctcttgttcaacaggaaaatcacaatggcaaatatacggatggcccggaactgatatagttccgggccatcttattgcgattaacgcaagatctgagtcctagaaggggcatcctttctaggaccttctcacttactcctcgatgtcaggctgaccgccctgatcggagtagaaatcatccgggttgaagtcgtcgccgagcttcagatcgccgaactcgaggttcgagaagttcaggtcagacaggtcggcgtcggagaagctcgcgtcgccgagatcgccatcgccgcccagaccgaagttcgggtagatggtgtcgcggatggccttgtcaggctcgaccacggcgttgcggtagcgcgcgaggcccgtaccggccgggatgagcttaccgatgatgacgttctccttgaggcccttgaggtcgtcgaccttctcggagagggcggcttcggtgagcacgcgggtggtctcctggaaggatgcggcggacagccaggagtcggtggccagcgacgccttggtgatacccataagcgccggacgaccgacggccggacggccaccgttcttgacgatgttgcggttgatctcgcggaagcgggcgttgtccaccagctcacccggcagcaggtcggtgtcgccggagtcgatgatggtcacgcgacgggtcatctggtgcacgatgacctcgatgtgcttgtcgtggatatccacaccctgggagcggtacacggtgtgcacttcctccacgatgttgacctgggcggcgcgcttgccgaggatggtgaggatcttcttgggatccacagaaccttcgaccagctgggtgccgaccttgatgtggtcgccgtcggcaaccttgagcggcacgcgcttggagacctggtaggtgatcggcttgatcacgccgtcttccttcggtgcgccggaatcggcgtccggggtcaggatgatctggcgaccgcgatcgttctccacgatcttgatgctgccggcgaactcggtgatcggggcctcacccttcggggtgcgggcctcgaaaagctcggtgacacggggaagaccctgggtgatatcggaggccgcggccacaccaccggagtggaaggaacgcagcgtcagctgggtaccaggctcaccgatggactgggcggcgacgataccgacggtctcgccgacatcgaccagcttgttggtggccagggaccagccgtagcacttggcgcacacgccgcgcttggactcgcaggtcagcacggaacggcacttgacttcctcgacgccgtgggccacgaggtcgttgagcacgtccatggacagggcgtcgtcgcgcttgtacagcacggtctgtccgtcggccgggtcgatgacgtcggcggcgagcagacgggagtacgggccaccgtcggcggccttgacgagcaccaggttgccgtcgttgtcgcgctcggcgacgcggatgggcagaccggccttggtgccgcagtcctcttcgcgcacgatgacgtcctgggagacgtcgaccagacgacgggtcaggtaaccggattctgcggtacgcagtgcggtatcggccagacccttacgtgcaccgtgctgggagatgaagtactccagcacggacaggccgtcgcggtagttggacttcacaggacgaggaatgatctcacccttcgggttagccacgaggcctcgcatacctgcaatctggttgatctgcatcatgttgcctcgtgcaccagactgcacgatgatggccaggttggaggtcgggtcgaacttctcctcgacttccttggacacttcggcggtgcactcggtccacaggtcgatgagttcctgacggcgagcttcctcggtcaacagacccatctcgtagttggcgttgaccttgtcggccttggcctcgtactcggcgatcttctcgtcgcgctcgggcggctcgttcacgtcggagaacgcgaaggacacgccggaccacggtgcgcgggtgaagccgagatccttcagggcatccagcgtggcggccacctgctgggtggagtaacgcatggcgatgtcatcgacgatcttggacagacggcccttggccacctgctcgttgacgaacgggtagtcggtcggcagggtctcgttgaacaggatgcggccgtaggaggtggcgaacagcacggtgccgtcgtggaagcgttcttccttgacgacctcgtcctcgccttcgcgcgggtcgagcaccttgacttcgccgggctcccagttcttcggcagcacgaagctctcgggcaggcggatgagcaccttggcctgcatgtcgatctcgtggcggtcgagggccatttcggcctcttccagcgaggagaacacgcggccctggcccttgacgccttccagcacggtggacaggtagtacaaaccgaggatcatatcctggctcggcatggtcacggtgtggccgtcggccggcttcaggatgttgtcggaagccatcatcagcgagcgggcctcggcctgggcttcggcggagagcggcaggtggactgccatctggtcaccatcgaagtcggcgttgaaggcggcgcaggccagcggcggcaggtggatggccttgccttccaccaggatcggctcgaatgcctgaatacccagacggtgcagcgtaggtgcacggttgagcagcacggggtgctcggagatgacctcctcgagcacgccccacacttcggcgtcgccgcggtccacaagacgcttggcggacttcatgttctgcgcatagttcaggtccacgaggcgcttgatgacgaacggcttgaacagctcgagggccatcggcttcggcagaccgcactggtgcatgcgcagggacgggccgaccacgatcacggaacggccggagtagtcgactcgcttaccgagcaggttctgacggaaacgaccctgcttacccttgagcatgtcggacagggacttcagcggacggttggaggcaccggtgaccgggcgaccacgacggccgttgtcgaacagggagtcgacggcttcctggagcatgcgcttctcgttgttgagcatgatttcaggggcgccgagctcgatcagtcgcttcagacggttgttacggttgatcacacggcggtacaggtcgttgaggtcggaggtggcgaagcggccaccgtcgagctggaccatcgggcgcaggtccggcgggatgaccgggatcacgtcgagcaccatggcctccggcttgttgccggtggtcaggaaggcgttgacgaccttgaggcgcttcagggccttggtcttacgctgttcggaagcgtccttgatctcctcgcgcagttccttggagatggtctccaggtcgagggactgcaggcgcttcttgatggcttcggcgcccatgcagccgtcgaagtaatcgccgtagcggtcctgcatctcgcgccacaggtccacgtcgtcgaccatgtcgccgggcttgagcttcttgaacttgtcgaagacggcgtccacacgggcgatctggtcgttgtagcgggtgcggatggcagccatatcacgctcggcaccgttacgcaacttggtgcgggccgggcccttggcctcgccggcctcctcaagggcggcgagatcctcttcgaccttcttggcgcgggcttcgatgtcggagtcacggcgctgctcaaggcgcttgatctcggaatcgaactcgtcctgcaggccgggcagatcgttgtgacgctcgtcttcgttcacctcggtgaccatgtaggaggcgaagtaaatcacgcgctccaggtccttcggggtgacgttcagcaggtagccgaggcgggaaggcacacccttgaagaaccagatgtgcgtcaccggggcggcgagctcgatgtggcccatgcgctcacggcgcacgcggctgcgggtcacttcgacgccgcatcgctcgcagacgatgcccttgaagcgcacgcgcttgtacttgccgcaggcgcactcccagtcacgggtcgggccgaagatctgttcgccgaacagaccgtccttctcaggcttcagcgtacggtagttgatggtttcaggcttcttgacctcaccgtggctccaaccacggatgtcatcggcggtggcaaggccgatgcgaatcttgtcaaatgcgttgacgtccagcacttgttaatccgtttctgttcttgagaccttcccaagctccccttgtcaggggagctgtcagccaaggctgactgaggggtagtgcaaaccggaaaggtctctgtacgttatttatttcacgttggcggagctacacgcggcgtattgaccgcatgcagcccgagggatcactggtattcgggctcttcggccttctggtcttccttggcggccgcgtcggggcgggcgccgatgttgaagccgaggtcgtcagcggagctggccggatcgtcatcctcatccttcatgtcgatggccacgccttcggcgttgagcacttcgacgttcagggacagggactgcatttccttcaggagcaccttgaacgactcggggatgcctgccggcggcaggttatcgcccttgacgatggcaccgtagacacgcacgcggccgtcgacgtcatcggacttggtggtcatcatctcgtgcagcgtgtaggcggcgccgtaggcctcaagggcccacacctccatctcgccgaagcgctggccaccgaactgggccttaccaccgagcggctgctgggtgatcatggagtacgggccggtggaacgagcatgaatcttgtcgtcgaccaggtggtgcagcttcagcatgtacatgtagccaacggaaatcggcttggtgtacggctcaccggtacggccatcgaacagggtggccttgccgtcggggccgaccagacggtcgccgtcgcggttcggcagcgtggtggacagcaggcccttcaggacctcaggcttgacaccgtcgaacaccggggtggcgaccggggtgttcggctcggccttctcggcaccggacggaatcagcttcttccactcggcttccagattcggatccaaagagatgtcccaaccggagtgagcaatccagccgaggtgcagttcgagcacctggccaaggttcattcgggaaggcacacccagcgggttcagcatgatgtcgaccggagtaccgtcagccaggaacggcatgtcctcttccggcaggatgcgggagatgcagcccttgttgccgtggcggccggagagcttgtcgcccaccgtgatcttacggtgctgggcgatgtagacgcggatcatctggttgacgccgttgggcagctcgtcgccgtcctcctcggcatcctcacgggtgatctccttgacaccgatgacggtaccggtctcgccgtggggcacgcgcagggaggtgtcacgcacctcgcgggacttctcgccgaagatggcgcgcagcaggcgctcctccggggtcagctcggtctcgcccttcggggtgaccttaccgaccaggatgtcgccggcctcgacctcggcgccaatgcggatgatgccgcgctcgtcgaggttggccacggcgtcctcgccgacgttcggcaggtcgcgggtgatctcttcggcgcccagcttggtttcgcgggcgtcgatctcgtactcctcgatgtggatggaggagagggtgtcgtcctgcacgaggcgctgggagatgatcacagcatcctcgtagttgtagccgttccacggcatgaaggcgatgagcaggttcttgcccagggccaggtcgccgttctggatggcggggccgtcagccataaccgagccggcttccacacgctcgccgtcgtggacgatcgggcgctggttgtagcaggtggtctggttggagcgctggaacttggccagcttgtaggagctggtggtgccgtcgtcgttcatcacgcggatcaggtcggcggacacgtaggtaaccacaccgtccttctcggacttgatgacgtcgccggagtcgttggcggcgcgccattcggagccggtgcccaccagcgggcgctcggattcgatcagcggcacggcctgacgctgcatgttggtacccatcagtgcacggtggccctcatcatgctccaggaacgggatcagggaggcgccgagggagaccatctggcgcggggagacgtccatgtagtccacggagctcaccggcacatcgaccgcctcttcttcgccgactcgggcaagggcggacttctgcacgaagttgccgttctcgtcgagctcctggttggcctgggcgatgacgtggtcaagatcgcggtcagcggtcatgtactcgacctcgtcggtcacgtggccgttgacgaccttgcggtacggggtctcgatgaagccgaacgggttgacgcggccgaaggttgccagggagccgatcagaccgatgttcgggccttcaggagactcgatcgggcacatacggccgaagtgggacgggtgcacgtcgcgcacctccatggaggcgcggtcgcgggacagaccgccggggcccagtgcggagagacgacgcttgttcgtcacaccggacagcgggttgttctggtccatgaactgggagagctgggaagtgccgaagaactccttgatggtggcgttcaccgggcggatgttgatcagggactgtggggtgatggcctcggcgtcctgagtggtcatacgctcgcgcaccacgcgctccatacggctcagaccggtacgcagctggttctggatcagctcgccgacctggcggatacgacggttgccgaagtggtcgatatcgtcgacgtccacgcgcaggtcaacgtcttcgccgttgcgcttgcccgggaaggtcgccgcaccgtcgtgcagggccaccaggtacttgatcgtggcgatgatgtcttcctggtggagggaacgatcgttgaaatcggcctcgacacccagcttgcggttgatcttgtagcggccgacacgggccagatcgtagcgcttggtgttgaagtagaaggagtccagcaggttcttgccggcctcgggggttggggtgtcggccggacgaatcttgcggtagaggtcaacgagtgcctcgtcctgggtctcgagggtttccttctcgagtgcatcgagcaccagcgggtagtccttgaatgcctgggcgatctcggacttggtcatgccgatggccatgaggaacacgatggcggactgcttgcgcttgcggtccacgcgcacctgcggctggtctttcttgtcgatctcgaactcgagccatgcaccacggctcgggatgatcttcgcgccgaagacttccttatcggaggtgcggtcctgctgacgatcgaagtagacgcccggggagcgcacgagctgggagacgatgactcgctcggtgccgccgatgataaaggtgccgtgcggagtctgcagcgggaagtcgcccatgaacacggtctgggacttgatctcgccggtgtcgccgttctcgaactcggcgttcacgtacagcggtgcggagtaggtgtaatccttctccttgcattcctgcacggtgtgacgcggctcttcgaagtacggatcggagaaggtcaggctcatggtctgagcgaagttctcgatcggagagatctcgttgaagacctcatcgaggccggaggtgtgggccacggtgttagtgccgttcttttcgtcctcctcgacgcgcgccttccagcgttcgttgccgatcagccaatcgaagctgtcggtctgcacgcccagcaggtagggcacatcgatgggttccttgatggaaccgaagttcacgcgatccgacgccttgtgcaggtcaatatcatgctggtcggcgcgtgcgatgatggtggtggtgttcgtcgtagactcagtagccaatggacgttccttatcgctcgctaatatgtggtaattcccctgggagcgccggcatggccaccatatgcctatgcggacgcttcattgtcgacggcatgcccgcaatatgacacacctcatgcaaagtcaaaagaatagcgctaaggcaagacttttactgcaccgtaaacgtcaccggatcgctcttcaccttcggatgatccttcaaactcagctgcgccacgtacgttcccgcattgactttggcccaacctgactcatccgtgcatttggcgagcgtggcgttcgcattggtattccacgtgaccttctgaacgtccttatcgcccttagccatcagcagcagacgtgaatccgccgggcacacatcggacttgtaaatcgtttcctgaccggaagtaatggtgagcacacggccggaatcggacccgtccactaaacagttgcctgacccctcgtgcacgatggtcgcggtgaaatcaagcgatcctcctaccggcacggattgggaggccgcggaaagctgcaatgtcacatcactggccgagcaatccttgacgttgctgactttcttcggcgccggcgtggcgtcgcgggaaatcgcatacacctcgtcatggtggatcatcgagttcacggcaccgataccccggccaaggctatacacgcagaatacaatcagcgcgattatcagcagcagcaccgtaccggccacgatacgccgacgacgatagatggcctgctgctttttgctgatcctgcgcttgcgcggcttgccggaacggttgttttgggagggcccgccggatggcccattggccccggtgccggctccgcgtgccgttctcgcgcctgatgtgttcctctgcactgccataactcttccagtctacggtcaccacgcccatacacgcttggggagcccaccatttttcacaatgtcagctgggtagtcgcaggccgccgtccagaatctctatcaggccgtcatcgtcaaggctggcgatgcaggcggcaagctgaatctggtccttccaaagcttgtcggcatcttccctgggcaacgtggctccagcgggaagctcgcgcagcgcggcgagcaccagaccgcgcacctgtcgatccgtgccttggaatcgttggcgtgggcgggtgcggcgctcccccagtccggggcggccggccttgagaaatgcacagtcgtccgcaatcgggcaggtgtcgcacagcggcgacttggccgtgcagatcaccgcgcccagttccatcaccgactggttccacgtgaccgatgggcgctcgccacgatgcagtcgagagcgtttgccgccacggatagtgctgttcacgacatgttcggcgctaccggcattatcggcgacgtcagcatcgcacccgagaatctcgtctttgggcagcatgcggttcgccagcgcgcgttcggccgggctggtcgctcccccgcgcgattcgacgcccaggaacacgcggctcagcacgcggcgaatgttggtatcgatcacggcaattcgttcgccgaacgcaaagctcatcaccgcggaggcggtgtaatcgccgatgccgggcaatgcagtgagttcgtcatacgtgcgcggcagtttgtcggcgtaatcttcagccaccacgcgggcgcattcctgtaaccgcaatgcgcggcgtggatagccgagccgcccccatgcggtgatcacctcggccttgggggcctcggcgagggcgcgggcgtcgggccaacgttccatccagtcggtccagtacggcactacacggctcatctgcgtctgctggctcatgacttcggataccagcacgccccacggcgtggcccggccgaagcgccatggcaaatcgcgcgcattggcctcccaccatgcgcccaatcgcaaagaaattgctgtgtcgttcatcgttcttattcttagcagctatgacgaacgaagcagaacagaattcgcagaacgcacagaatcccgaaacaaaagtcgagaagatgttcgagtacgggtaccgtaaatcgaattacggaccggacgaactcgtaaccgacgcgcatggcaaccccatctccgtggtggacgcgatgctctcggctgaaaaggccgccaccaccgaaaccgtaacaccgcatctgtgctactactcaccgcgcattcccggcaacaccggctcggccatccgcctgtgcgcggtgaccggcaccatcctgcatttggtggagccgttgggtttcaacctgcgcgacaccaagctgcgccgagcaggcctcgactaccacgacatggcccacgtggtgctgcacccgaatttcgacaacctggtggagtccatgcccaattcgcgcatcatcgcgttcaccgcacatgctaccaagctgtacaccgaggtggaatacaagccgaccgacatcctgctgttcggccccgagcccggcgacatccccgacccgatggacatcatggagggccctcatgtggccgaacaagtgcgactgcccatgcgcccgtccttgcgttccctgaacctcaccaattgcgcgtccatcgccatctacgaagcctggcgccaactcaacttcgctggagggcgctgaggagaaggcccggtgggccttcgagtagcgacgccgaacgaacgccgacaggcgtgagagaggaaaccctgagcctcgcagcacgaccatcatcgcagaaaatgggtctatcggcgcttcgaggggctgatttggcatctgccggaggtctattgccgcttcgaggggctgttaaaggacgaaaccccgagtataggcgttgaaatatcaacgcttgtactcggggtttcttgattgaggtacccctctgaaagcagatacctatctgcgcaaatgtacctctttgaaggcagataccctactgaatcagttcttgaagctgtgaatcggagcgggaatacgaccgccacgggtcacgaaggcctcgcagctggtctggttgaccggcatgatgggcgcgtagcccatcaggccgccgaagttcgccatctcgcccacgcccttgccggcaaccgggatcacgcgcacggctgtggtcttctgattcaccatgccgatggcggcttcgtcggcgatcaggccggagatggtggaagcagaggtatcgcccggaatggcgatcatgtcaagacccaccgagcatacgcaggtcatggcttcgagcttctcgatggtcaggcaatcggaagaagccgcgtcgatcatgttcttgtcttcggagaccgggatgaacgcgccggacaggccgcccacgtaggaggacgccatgatgccgcccttcttgacctggtcgttgagcatggcgagcgccgccgtggtgccgggagcgccgacctgttcgaggccgatcttctctagcacttcgcccacggagtcgcccacagccggggtcggggcgagcgacaggtcgatgatgccgaacggaatgccgaggcggcgggatgcttcctgggccacaagctggccgacgcgcgtgatcttgaacgcggtgcgcttgatggtctcgcacaggaactcgaagtccttgcccttggccgcatcgagtgcgcgggagaccacgccggggccggagacaccgacgttgatgaccgcgtcgccctcggtgacgccgtggaagcctccggccataaacgggttgtcgtcaggcacgttgcagaaggccacgaacttgacgcagccgtaggagtcgttgtcggcggtacgctcggcaacgtccttgatgatatggccgagcagttcgaccgcgttcatgtcgatgccggtcttggtggagccgacgttcacggacgagcagacgatgtcggtctcggagagagcctgcggcagggagcggatgagcagctcctcggccggggtcatggacttggaaacgagtgcggagtagccgccgatcaggtcgacgccgacttccttggccgccttgtcaagcgcgtgggcgatcttgacgaaatcctcgctcgtcttgcaggagctggcaccgaccagtgagatcggggtgacggtgatgcgcttgttgacgatcgggatgccgtagtcgcgttcgatggccttgccggtggaaacgaggtccttggcataggtggtgatcttgcggtagatgttgtcgcaggtcttgtcgacatcgtccgaggcgcagtcgagcaacgagatgcccatggtgatggtgcggacgtcgagcttctcctgctcgatcatctgattggtctcgtggacctccatgatgttcagcatggtttgttccttacaggatatttaaagactagtttggcggtcaccctcatcagagggataaggatggctccgtcagtggaaagcccaccgggctttccacctcctcgcgtgaggcggcctgctgagcgggccgcctcaaatacggtgcatcttggtgaagatttcctcacgctggcagcggatgcgcacgccgatgtcgtcgccgaggtcctcaaggttgccgaccatcgcgccgaagtccttgtccgcgttggcgtagtcgacaatcatcatcatgttgaagtaaccgtcgatgatggtctgcgagatgtcgagcacgttgacgttgtgctgggacaggtaggtgcagactcgcgcgatgatgccgacggtgtcctgaccgacgacggtgatgattgccttgttcatggctctccctggtcgtatacaaaaagcgggtgactacccaagtatagggaagacacccgccatttagcattgtgatttattatcatgcctcgcgtgaagcggatttcgccgcgtacgcggcaagcgcgcgcggtgcgtggaagccttgcttttcgaattcgtcggcgatcttctgagcgacttcctgggaacgacccttgtcgaccagagcgatgatggagccgccgaagccgccgccggtcatacgcgcaccgtaggcaccgttcttgcgggccacgtccacggccacgtcgagctcgggcacagtgacctcgtagtccgcggccagcgaatcatgggaggcgttgaacaggcggcccgcggcctcgatgtcgccgctggcgaaggcgcgcacgaaggagcgcacgcgctcgatctcggtgaccacatggcgcacgcgcttcttcatcgtctcgtccggcagcgcgtccagcgtctccttgagcgcctggaacgggtcgtcggccttggcgatgccgtcggcggtgacgcgcaggttggccacgccgaggatcttcgcggcctgctcgcaggtggcgcggcgctgagcgtactgaccatcgttgagctggtgcggagcctgggtatcgaccacaagcaattcgaggttgtacttgtcgagatcgaactcctgctgggagacgttctccagcggggtgagctccgggcggcagtcgagcagcagcgcgtggccttcggtgcaacgcatggaggcgctctggtcaagaccaccggtggaagcgccggccatctcgttctcggacttgatggcagcgttgatgagggtcacgcggccggcgtcggaatcgccgtaaccaaggccgtacacgtcgtccagagccagagcggtggagcaggtcatggcggcggaggagctcaggccagagcccagcggcacgcaggagacgaaagcggcgtcaaagcccttgaccttgtcgaagccggcttcacgcagcgcccaggccacgccggtcgggtaggcggaccagccgtccacgccacgggccttgaggccatcgagatcagcttcggcaaccttgtcgggagccacgtcggagacgacgcgaaccttggtgtcttcgcgcggcttcagggcgatgaaggtgcggtgcggcagagcgatcggcaggcacaggccggcgttgtagtcggtgtgctcaccgatcaggttcacgcggcccggagcagcccacacgccctcgggcgcagcgccgtaggtgtcgacgaacagcttggtagcttgcgaaacgccttcctcatgggtcagcggctcaatgaattcaacagcagtcattgatgttttctttctatcagtcggcgatgtcgatggagccgagctcgtggaagcgcttggcgatgagttccggcgtggtgtcggagatccaggcggccatgccggattcggagccggcgaggtacttgatcttgttggcggcacggcggaaggagaagaactgcaggttcaggcggtagttctcgcggcgcttgtcgtggatcggggcctggtgccaggcagcgatgtacggcaggtccatgcccttgccgtcgcccttgtcgaagaaggcgttgccgcgcttcaggaggtgcgagtacatggaggcaaggtcccagcgctcttcgtcgttgagctggtcgagggtgagcacgtcgcgcaccggggccacgtggacttcaaggggccaacgggcggcggccggcacgtaggcgacccagctgtggttgcgcatcacgatgcgttcgccggcttcgagctcggcgttcatgatgtccttaagcaggttgccaccggtcttctcgtggtaggcctcggtgtgctggagttccttctccatcttcggggcgatgaacgggtagcagtagacctggccgtgcgggtgggcgagggagacgccgatttcctggccgtggttctcgaacgggaagatctgctcgatgccttccatcttggagatttcggcggtacggaaggcccaagcctcaaccacggtgcgcaggcgggagaccggcaaatcggccggcaggccgtcctcgttcgggtcgaagcagatgacttcgcagcggccggcggcgagcttcttctcccacagcgggttgccgtcaacgtaggtcacgtcctcggagacaccgggcacgcgcaccatcgaggggaagcggttctcgaacaccacgacgttgtagtcggtgtccggcacttcgccgtcctggtacgggtcaccgggcttgcgggcggccagcgggttgcccttggcggtggcgccggggccggcggtgatcgggcggttcatacgggcggtggccatcgggatccagtcgccggtcagcgggtcgcggcgcatctgcggggcggcgtacggcacttcgttaccgtcggcgtccagatgcggggcgaaacggtagtccagcgggcgcgggtccttgagctcgcgggtcttggcaccggagacgaactcggggtcgtcgtccaggtagaagaagtcacgaccgtcggcaagcgtcgccggcgtgatgcggatatgctccttcgcatactccccgggggtgtagttggcgaaatcagccatgggtttgctcactttcctcaatggtctcgctctggtgggccagcacgagctcctttactaaatccttggttttggcggcggagtcggggtcgagcccgtcgtcagtaatgaccgtgtccacttggtcgaagcgcgcaaacagcgacagcgacgtgcagctccacttggtgtgatcggtcaaaactatggtgcgatcggcgatgtccatcatcgccatatcggttgcggcttccagcgaattcggcatcaggaagccacggggaatcgacaccgagtgggtgccgaggaatacggtgttgacacgcagcgaagcgacgaccttgtccgcgatcgggccgacaagcgagttcgatcgggtgatcacgccgccggtgacgatcacctccacatccttggattcgagggcctggaccagctcggccacgggaatcgaattggtgaggatggtgatgccgctggactgctgcgattcgagcagatgctgggcgaagacataggccgtggtgccgccgccgatggcgattacatcgccgggagccacatatttgatggcttcctgggcgatggcgtccttcaggccgatatccatctgagacttgacagagaacaggggttcgctgagcaaggtactggtagtcaccgcgccgccatggacgcgcttcaacagtcccttgtcggcaagttcggcgatatcgcggcggatggtcatcgccgacacacccagttccttcgatagcgccgtaatgcgcactgccccgcgtgtgcgcaacctgctcaagatgaggtgctgacgttgtgacgaaatcatgcgaacattatcgcacacaaaagcccacaaaccaaaccggcttgagcgttttggggacaatttctcgaaaattccgagcaattcaggtgtcatttccacaaaaccgcgcaaaatcgcacattgcgcgaaccgatattctcacagcggctactagcgcgatagctcacgaccgacgactctcccgcgcgcgttgctcagcggagagtcacgcctgatacctggtgcgtcccggttcatgtatcttctgccgagccgacgcctgcgtgcgcctcgacacgcagtagcccccttccccaattcgcctaggcaggaatcgcctagccgcaccggcccaagcgtgagacaataggcggtatgacttacgtttctgaaagcttctggcacgacgccgtcaacaaagccaccaccgatctgttcaccttcggctacaagcacatcatcaaaccgaacttcgtgttcaaccaccgccccgatgaggcacacgatcagatgatcgagttctgccacgtcgtcaagaacgtcccgccgctgctgctcgccgaacagctgatgctcgactacaccgaccccattctggaaacgaatgtgatgggcgtcgatttcaccaacccgttcggcctgtccgccggcctcgacaagaactgcgagatgcccgtggtgctggaccatgccggcttcggcttcgaaaccgtaggctccaccacctcgcgtccctgcccgggcaacgccaagccgtggttccaccgtctgcctgaatacgattcgatgatggtgcacgtcggcctcgccaacatcggttcggacaaggtcatcgagcgcgccgagaaggcttggactcaggcccgccagatgcagctgtccgtgtcgatcgcccgcaccaacgacgaccagtgcggcgatttggacgaaggcattgaggattactgcatttcaatgcgccgcgccgccggccgcaccgcgatggtggaggtcaacgtctcctgcccgaacacgcacgtcggcgaaccgttcaccgcgactccggaagcgctcgaccgtctgtttacggcgctcgacaagatcgaccgcccgcagcccacgctggtcaagatgccgttgaacaagccgtggggcgagtacaaggaactgctcgatgtgctggccgagcacaatgtgcaggggctgtccatcgccaatctgcagaaggaccgcaccggcctcgagattccgcgcgattgggagggcggcctgtccggcggcccgtgcaccaacgccagcaccgagctgattcgcaaggtgtataaagagtatggcgaccggttcgctatcgccggcatcggtggcgtctttacccccgagcaagcctatgcgaagattcgttccggctccagcttggtcatgttcatcagttcgctgatgtaccgaggcccgcagcagattaccgtgttgaagcgcggtctggcccagctgctgcgccgcgacggattcgagcacgtctccgacgccgtcggcgtagacgtggagtgaactcacatattgccctattacccatggggcggtaaaaccctcatggggcggtgattgtcccatggggcggttagccaaatttcacattccgcagaataccgccgttttgggttaccgccccatgagggttttaccgccccatgggaaagttaccgccccatgaggatttagtacgcaccggccacgtattgcggggcgtaggggatctcggtggacggtatgcccagcttgttggctgcacgcaacggccagtatggatcacgcaatgcggcgcggccaatctccacggcatcggcttcgccatgggccagaatcttggccgcctgcttcggcttggtgataagacccaccgcggtcaccggaatatcggccttggccttgacctgctcggagaacggcacctgatagttcggcttgaccggaatcgacactcccgacatgatgccgccggtggatacgtccatcacatcgacgccatgctccttcagcaccttggatagtgcgatggtctggtccaaatcccaaccgccggcggcccaatccgtggccgaaatgcgcaccagaaccggcacgccctcggggacggccccacgcacggcatccacaacctcgaccaggaaccgagagcgaccggtcaaatcgccaccatattcgtcatcacgctcattgctcagcgggtcaaggaactgagaaatcagatagccatgcgcggcatgaatctgaatcgcctggaagccggcggccaccgcacggcccgccgccgcggcgaacgcgccgaccagaccatgaatctcatccacggacagcgcgcgcggcgtacgcaacccaccgaacgcgatttcagacggtgccatggtaggccagccgcccgcctcctccggcacgctctgaccgtcgtaaccaacggcaaagcaaccagtcgaagccttacgccccgcatggttgagctggatggcaggcaccgcacccgcctcgcgaataccgtccacgatccagcgccaagcatcaatctgcccgtcttcccacaggcccagatcgcacggcgtgatacgcccctcaggagccacggcggtggattcgacaatcaccatgccgaatccgccgaacgcgcgagacacgtaatgctggtagtggaacggcgtgggcctaccatcgcgggcgaacgacgaatacgtgcacatcggcggcaaccaaatacgattacgcacggtcacctcgcgcagcgtcattggcgcaaacagccccggacggtccttgctgactttcttatctgccttgctcacagcttccctttcctcataatcctcataatcatcgaacgattcgctcgtcttgcccgcgccggcccgcttcttggaccgtgcatcggattttgacttcttcttaccgtgcttacggttcttcgatgcatcctcgtgcttggtcttcggctgcttggactgatcgccgtccgaagacgaagccagcgtcaccgctttgagatccggcacgtcgaatccacgaaaatcaaaattctcatgcgtcagatcgtcgttgctcatcgttcccctttccgatgcacgttcatggcaaatattcgatgaacgcgatggcgttgtcattaagtattgtaaaacgggcgtcacctgaaacaggtaacgcccgcaaactacgtaatttgggtatcgcagtcggccatgttacgcagactcagccggcatgcaatcaccaaatgtcaaacgccaatcaccaatcactggccatcattcgactgctctgaattggtgccctgggtttgggtgttgttttgcccagtgttctgcgactgagactgattgttgctgctctgcgattggctgttgccattcgtagtggtctgcggcacgctgaacgttcgtccgccaatgcccagatacttgccagtcgtggtgtacttcgagacgggctggccgtaatcgttgtcaatcggtattttcttcttggaaatgtagctattgaagaagttggtaacggccggagccgcgattgtcgaaccatcccaatagctgttgtaccggccgttgatggcaatgttggaaatacggttggtgtacgggttctgtgcatcgccgaccacagcgaacgccgcaatctgattaggaatgaacgatccaccggacaccgcaagatcctcactggtaccggtcttaccaaacgacttacgcccgtcagccaatctgaatgaccaaccggcaccatccggccgcaccgtaccttggttcagggtataagcgagtgtttggatgatgtccttatccaccgcctgatggcagttcgcggatggaaccttgagatcgttgccgtccttatcggtcaccttgctgatggcaatcgggttgcattgcacaccattcgaggcgtatacggcgaagatgctcgccatggtcagcggggacacattcaccgagccgatcatcatggatggtgtatacacctgggttttgtcgatggtctcacccgtggcggcgtcatggtatcccagttcagtcgcggtgtccgccaccttgcacagtttgaggatggcacccatggaagcctgagtagtgttatgcgaacggaccagaccgaggaatgggctttctgggttcactgtacctgcgcccatggcgttcgacacgttccacgaatcggcaccgcccgaatagttactgcaggcgaagtccgtagtggggtatgacgtcgaggtctggaggttgtcgttgatggaatggcccgcttccatccacgcaatcaggttgatcggcttccaggacgaaccgatggtccaaccagaaccaccgccatccgccaaatcgacggcatagttctggctcgtcttggtgggatcgttcgcggctgccggagtggcgtcataataacgattcaggccaaagctcagcacttcgccggttcccggtttgactgcggccatggctatctccatgccgctgggatcgtccggtggaatggtattacgcgcggtctccatcatcgtggaattcgcttccacatccagcgtggtgacgattttcaggccaccctcctgcagcagcttgttacgctcggcacgagtcttgccgaattcttcggagttctggatgcgatgcaccacaaaatcgcagaagtacgcgtaatcgccggtgtcctgacagccgacattcacgtcctgtgctttcagcgtgtccttcaacggcgtgttcacagcttcggtgtactgcttctgggtgatgtatccttcctgcagcatcagcttgagcacgatattgcgttggttttcgctttccttctggttctcttcgaccagcggatcatacaggcttgggttcttggtgatagccgcgatggtggcggactgcaccacgttcaaatcggcggcggacacgctgaagtagcgctgggccgcggtttccacgccatacaggttgttgccgaactgggcgatgttcaaatagccctgcagaatctcggccttggaatacttcttttccatctgcacggaaatcagcatctcgcgaatcttacgggcgatggtgtcttcagtggcatggtactgggcgatcgaatcgtcatcctcgatcgcctgcatcagcagcacgttcttgacgtactgctgggtcagcgacgaaccaccctgctgggagcctttgacgaggtaggtctgcacgaacgcacgcatcacgccttgcacgtcgacgccggcgtgagtccagaatcgacggtcttcgcgcgccaccactgcctgctgcatggttttggaaatcttcttcagcggcacgacgatacggttttggttgtagaacgtcgcgataacggtggaaccgtctcgcgcgtacatcgtcgacttctggggcagactagtcacgtcgaagtccacgttttctaccttgagcgacggaatcaccgctttggcggctttattggcaccgatcacacccggtacaaacaacacgctggccgccacgccgccgcagacggcaagcatgatataggccaagaggagaacaagcacacgttggagagtgagggacttctttttgggcatgggccccattctaaatggggtgccctaccaaccgggcttacggtcagctcccgtgaacatatcatcacaagaatcgcactagcgtaacattggctggaagtcagccgaacggtcagcgccgcgagcgtcgaatcagcataccgggctggaagatgatgatcgatcggccgtcacgtgcgatccatccgcggttggaaaagtccatcaacgccttgttcacggtctcacgactggagcccaccagttgggccagctcttcctgagtcaggtcatgcggcactttgaggccctgttccaccggctcgccgaaacgtgagcccaagttgagcaatgtcttggccagacgcgccggcacatccatgaataccaagtcggagatgcgttcgttgttgccgcgctggcggctggccatgacctgcaacatgtcgatggccacacgcggatgctcatcaagccatgcgaacagggcatcatgctccagccagaccacgcgcgtgccatggctcatggacaccgcggacgcggtgcgcgggccaccatgagggtcgaataccggaatctcgccaagcacttcgcccggcgcgtggatggacagcagctgcacgcggtcatcggaagaagtgcgaatcagcttgacgcgcccctgctccagtaaatacatgcgctgatcggtatcgccttcggagaagatatagtcgcctttatcgaacgtcgcatgcttcaaatgcggcaacagctcctcggcttcggctggcgatacctgcttgaacaatgccgtatgcaacaggatgttttcctcgtcagcaaaagcgtttggcgtttccaagctcatcgcaccatccttattgtcctatgaccgtcgtcgcccatccgtcatattgtaacgcgccccacaggtttcgtcaggagcatgccctcattcgtcacttcatgtgtggcacgatccgatagccgtacgacatgctgacgaatgcgttaccgcgaaaaacggcactgtcgcggctaccgcgctcgcccatgacaaaaccgcgcacggccagcggcaaaatcgtatacggccatcggtgaaatcacgccgcaaaccagtcaataaggtgctcgacgatgtgttcgcggctgagacccgtctggcttttcatcgggtccacgcgtttgaccgctgatttcaccgctttgtctgacatcttctcgcgactggtgttgagcacacggctcatcttggccgcatcgatgtcatatgccatggtcacatggtgcagcaccgcgccgcctgagcctacggggaagcgccgctgcgccgctcccccgatcttgccgtactgcgaggcgatatcattgaggcccgcgaaccgcacatctaaaccaagttcgcgcagcgcttcgaccagccaccagtcacagagccggtaggattcttcgatgcttacgccctgaacgaaatcgagcggcgcatacagagaataggtaatggtgttgcccggttcgataaacatcgctccgccgcccgtgcaacggcgtaccacgtcgaagccgagctgcttggcaatgtccagattcacctcgtcctgggccgattggaaacggccgatgaccacagccgggcccgcccactcccataatcggatggtcggctgtcgtgttcctgctgcgacttcacgcgcccaggtctcgtcaatggccatttgctcgtccggagtacgcggatggccgtggatcacggtgagttgaggcttgagggcgttccagcgctcccggtattcagagcttttgtcgggctgcttggtttgtgtattgatggatgctgggatgttcggcgcatcggggctgcccacccccacccgctgcgctggagcccccgccagcgggggtaagttgctgcttacggctcggctgtatgcggttttgatggcaatttcatctgtgccgataatttggcaactaggatgggcgtccaatacggaccgcaatgaatcatcgctaattagagctcgttccaggtcatgcaacaaagcatgagattcggcatccgaaactgattcaataaagaaatcaccgctgatatggcatgactgtgcggtgccgtcatcatcgacggatacggtcacggcgactagtttgctgccaacggttttgcattccccatgtcgcatttgcatgcaactcagtatagagagttttctggctcccctcagcgaggggagccaagtttgaggtcacatgcgggccagaatgtccttgccgacctggtcggtggagcgcacggtggagccgagctcctcgatgtccgcttcgacggcggtatggatcttcttggccgcatcatcaaagccgagatgctcgagcagcatggcggcggagaggatggcggcggtcgggttggccttgttctgaccggcgatgtccggagcggaaccgtgaatcggctcgaacatggacgggaactcgtcggaggcgttgatgcagccggaggcggagtagcccacgccgcccaccacggagccggcctcatcggtcagaatgtcgccaaagaggttgtcggtgagaatcacatcgaaacggctcgggtcggagaccaggaagatggtggccgcatcaatgtgctggtagtcgtgggtgacctcagggtattcctcgccgaccttgtcgacgatgcgctgccacatatcaccggcgttgacgagcacgttcttcttgtgcaccagggtgacgtgcttcttgcgcttcatagcgagcttgaaggcgtaacgcaccacacgctccacaccgtatgcggtgttgatggacacctcggtggccacctcctgcggggtgttgcggcgcaccgcgccgccggcaccgcagtacagaccttcggtgccttcacgtaccaccacgaagtcgatgtcgccggggttggcgagcggcgaggtgacgcccttgtacagcttggaggggcgcaggttcacgtactggtcgaggtcgaagcggagcttgagcagcaggccgcgttccagaatgccggccttgatgcgcggatcgcccacggcaccgagcagaatcgcgtcgttggccttgatgcgctcctcttcgtcctcgggcaggatcgcaccatcgcgcagatagcgctcggcacccaagtcgaagttctcgtactcgaagtcagctacgccttcagcggccttttccaaagccttctgagcccacggagtgacttccttgccaataccgtcgccgggaataacggcgattttatatgtctttgccatagttcaaggagcctactcgcgctatcacctgccggcccgaacccgctcagctagtggacatggcctaatgagcgagccccatcacatccatgcaccaagcgttctcataggaaacctcttcccattgcttgtaacgcccggatagaccgccgtgaccggcctcgacctcaatcttggccaccgcgtccacgccggcggactgcaaacgggccagccatttgagcggctcgacgtacagcacgcgggtgtcgttcatcgaggtggtaatgaagattctcgggaattgcgcggcggcgaccgcgccggtggcagccccatcagcactgccgtcaccggcagcctcgtcgttgccgccctcgagcacggcgaccggcacattctcgtatggcgtgtacgacttcatatactgatacacctcagggtcatgcaacgggtctccccattcgtcccattcggtgacggtcaacggcaagtccgggtcaagaatggaggtcaacgcgtccacgaacggcacatccgcctcaacaccggcgtagcattcgggcgccatattggcaatcgcgcccatcagcagaccgccagcggatccgccgttggccacggtgcgccaagcatcagccaaatgcgccttctgcagcgcgcgtgtggcgtccacgaagtcctcaaaggaatgcttcttgttcagtctgcgcccctgctcataccaggcgcgtcccatttcgccgccgccacgaatatgcggcacggcgtacagcacaccgcgatccaacatgctcagacgagagaccgagaaccccggatcggaggaaatctcgtatgcaccatatccggtaatgaacatcggcgaatcctgcgccgggcaatcgcggtgccagacgagggaaacaggaatgcgttcgccgtcgcgcgcggtaatccacacacggcgttccatgtaatcgcgtggattgaagttgcccaacacggtggctcgcttcagcagcgcatcttcaccggtggcgggatcgatttcgtgcaactcgcccgggcgggtgtagctggcgaacgagtagcgcatgcgcggcgcctcatacgaggggttgccgccgacgccgatggtgtacaagcgccgggtctcaccgggcaggtggtcgtcgctagcaccatcggaagatgacgtgtgatccgtgggggcctcatcttcggtccacaagatttcgccatgatcgccggtgaagttttcgcgatcgtcggcaaccatgtcccagtcgtcctccagggcaggcggcagcaattccgtaaaccgccacggccgtccggccaggaagtcggcggcagccgcgctcttggtcatgtatgccacgtgcggctggccgtcggcacggtagctcagggacacaaagttgcgatgcaacgcaatgccttcgatgcccagaccgtgggcaccctgcaatatcgccggattgacggcgttgaagtatgcctcggtaatcggcttatccggctcaccatgttcacagccgtacggcgacccggcggcaatgcacacgccttcgccgagtcggtacggcggctcatggccacgcatgtcaatgacgtcgatttcgaaattcggattggcggcgttgtgatagaccacggcgagtggcacatccgcaccgttctcccccgcgccttcaaaacaggcaaagctcacatcatattcaatatcgttctgacgcggaatgaaagcttggaattcgccttcaggcgtggccaccggcagcatcagcacttcggtggtggttttggaaccggtgccgatcacgatattgcgctcatcaaaactgatgccaacgcccacccagaaccgttcatcggtttctcggtacacgcacacatccgattcgaccgccgtgccaacacgatgccgccacacagcgagcggccgccaggaatcgtccaattccacccagaacacccattggccgtccggcgtgaagcatgcgctgccaatgccggtgaactgttcgggcagttcgctgaccggctccccggtctccagcccggcaaggtcgcgaatgcggaaatcatatcgttcgtctcccgcaacatccacgccgtacagcatccaacggccgtccttgctcagatccaagccgccgagccggaagaagtcatgtccctcggattccttgttcgcatcaaaaacgacctgttcaccgggcatggagccgggcgcgccttgcggatccacgaccggcgggtcccagtcatcggcatcgcgcacggggatgcggcattgcacgccatactgtttgccctgctgcgtgcgggtgaagtaccagtaatcattgacgcgcgtgggaaccgacatatcagtctcttccacatgcgatttcagctcttcaaacaacgtatgccggaaatccgccagatgcgccatgcgacgctcgcagtactggttttcggcagctacgtagctgcgcacatcatcggagtctttgtctcgcatccactcgtaatcgtcttcgaaaacgtcaccgtggaattcgcggcgcttcggctcgcgcttggcgtaaggcggcatcgcggccgcggcgtttgtgctctcgtcagtcataccacgcgattataggcgaggcaccgcaccgggacgcattcagtgttcatcacgccgcgcctatcgcaacaccgtcttcagatacggcagcatggtcttcagaatgttcgagccggtggtgccggtgaatactggcacatcggttaccggagtcggctgggtcgaggtgagccccgtcaccgacgccaatccggttgattcgcgcgggctcaactcacgaatgacgatcgccagtacacgtccgggatatctgcgggcgatggtggcgtacgtggtcgggtctttctgcccgtcatcgcccaccagaatgaacttcatgtctgggaagtcggccataagttgttcggcaaactcaagtttgtgctgggggccggtgggtacgaaggtcttgggcctcgggtcgaggtcgcgcagcagcagcgggccttcgggaaaaccatggtcagtgatgaagttgcgaatcgaactctccacattccagggcgatgtcgaaagatagaagaacggtgcgccggggaacaagtcggcgatgcgggtgaacagcacgctcatgcccggcacggaggctttcttcttggggtcgaggaacagcaggttgtacgcggccttccatggcaccggggcctgcgtgatcatgatggtgtcgtccacatcggagatgatgccgactttggcactggcggggatggtgtacaggttggcgctcacgggtttgcggttggccacgctgtaggagacgcgatggatgccgggcaccagacgatgctcggccacgaggtcgagatatccggcggaatcggagatggcgtattcgctgccgagatcgcgcgtgcggtccaccttgtcatagacctcggagacgccgatctgcacggtgttgagcggcatgtcatcaatgctggcctgcacgtgggtgcgcggcgcgggtatggcaagcatgccgcggatgccgcggatcagttcgccggattgcgcgtgcctgggggcgtataccgtgcggcagatcagacgcgagtaatcgccggtgccataacccacatagggttccactcgcggataccagtcccattggcgcaccacctgagtggagatgcgtgaccatacgccgaacacgcgggtgacggcacgacgtatgaatcgggtgatcggcggtttgacttcgatgcgctcacgcttggagggggtgtcgaacgtcgtggcagccttgcgtgcgggaatcggcacggtgggcatgtcatcggaatgttcagcgttgctggcattgtcggcaccattggcggatgccttgacgtcagagactggcgcggtggcggacagcgctgcactgcgagcagcagcatcccaaggcagtcgcttgcctgccgcctcaaaatcctcgcgtgggcttctcatagacaccaatataggccatacgcctcattttcttggctcccctcagagaggggagctcaaaaggaactaccgcacgaccttcgcgtattcgtcggcgctcagcagctccggctcatcgtcgtcaagctcaaccttcagcagccagccttcgccgtacggatcgccgttgaccacggacgggtcgtccgccacgtcacggttcacatacttgaccgtacccgccacggggctgatcagcggctggacggccttggaggattcaagctccacgatctcgtcgccggcctccacacgggcgccaggctcaggcagatccacaaacacaagttcgccaagctggtcggcggcgtattcggtaatgccgatgattgcggggtcgaccgaacggtccacccatgcatgttcctcggagtattcgaggtggtcgggaatgtcgagattcagcggctgttcgttttcgttgtcatcactcatagtcataagcctaacctatcttcgcggtccgtcacagctcgcgaccgagccattcctcaatcatgtagcgggcgatggtggcgcggcccggcgccgccatacggccggcgatgagctcggccgtgtattcgtcgcgtgtgacccatcgcgcggtcatggtctcctcgccgtccacacgcacgtcggtggtgatcgcatgtgccttgaacgccatcatcagcgaagccgggaacggccacggctgcgaacccaggtaccgcacctcgccaagcttgatgccggtctcttccatggcctcgcggcggcaggcgtgttcaaggttctcccccgcctccacaaatccggcggacaccgaatacagcctcgaatccttccatgccgcgttgtgttgcagcagcagacggtcgtgcccgtccacgatggcggtaatgaccgccggctccacgcgtgggaacagcacacggttgccgtccgcctcgttggtgcatcgctgcgcccatccggcgagcgccggccggaccgccgcgccacaggtgggacagaaccgctggcggctgtgccagatgcttaaggtgatggcactggtggcttgcccggcctcgcgcgcgttggagtgaggggcaaatccgcgcaggtccacccagtcgaaccgggtcacggcctgttgcagcagcgtgggcttcggggccaagggctgtacgggcgcgccgaccgaatcatcgaaggcatcgtccgcaccttgcccggccgaatccggtacaccgagcggcccggcgattttggctgcggctacgccgccattacccttggcgtttcccggctgccgtattccggcggcagcacctccgctgatgccgttcttgcccagcgcgccgtccacagtgccggaatcctgggtgccgagcacgccgccggcagcaccggaaacaccagcaatcccgccaacaccgggaacgccggcttccggcacgcgcgtgatatccacggcgaccacggattcgccgcgcgccccgacataggagccaaggaacatggcgaccgcttcagggtagcgtgccagttcggcggacacataggcgcccggcaacgtggcgagccgcattttcacgttctcatagtccacaagctcgccttggccgcgcggtacggcgacaagtccgccgcgcgtaagcacgactttggtggtcggctcggccagcagctcgtcgatcaggccgggttcgcttcgccggtccacctgatagtcgatgtcgccttgtgcgagcggcaggaacggcagcgcatgggtcagtgccagaggcgagaaatgaatgtcagcggtcatcgaggtctcctatgcgttcttctgcgcgctctgcacgcgcttgacgagcgagagcagtgctcgcgccacggtatccggatgttcgacggcactgaaatggccgcagtccggaatatcgatgaattcagcgccggtgattcgttcggcgagcggccgcatcacactcggattgctggaggggtccagttcgccggataccaccaggctcggtgcgctgatcgtttccggcaccgcccccagttcaggccgtccgtaggtcatgcgctgacgccaagccagaccagccgggttctgttcgttgatccagccggtcatggtcgcgatgaattcaggagtctttttgacggtggaatcgccatcggccggttgcgcgaagtgcatcaccggttcgaccgagttcgtctgttcggcggcgtccgccatcttcagtcggttctctccgcccacgccgtcggacgcggccatcgtgtcgcacaaggccagtccggccaccgtttcggggtacaggcgctggatgtccatcgccacgtagccgcccatcgacagcccgacccaaatcgcctgctcatagccggcggccttgatcaggtccacgtaggctccggccaggcgatccaacgcctcgctgtacgcgccgttcgccatgcgggggcccgaatcggcgtcgctcggcaccggggatgcgccggagccggccatgtccggagcccagatcgggaagtccggcacgtcgttcaggtcggcgaagtcggcgagcgccttcgcgcacacgtcccacatgcggtggtccaccgggtaggcgttcatcagcaccaccggcacgccttcgccgtcgcggtagatatgattggccaattcgattgccatgaattactccttcacattcgcgccccactggcggagctgtcggcacagtcggctgggagcggtctcaacgcggaccgccctccgtcgctacgcgccatcccctccaacggaaggcaaaacaactgtcagattccggcccaggccaacgcctgtcgcacgatgcgcccatggccgttgaccatctgcgccacgaacgtgtccattacgtcgctcttgggatccacccattccacatccagcgtctcatcctgcggcttgcagtcgccggcgataggcaccacgtagcacagtgcgatggcgtgctggcgcggatcgtagtattcgcttagtcccggcgtggggaagaattcggccacggtgaacggctggagcccgatcggcagcagcggcaaggcgatatcgcccaaatccttggccacattgcgggcgatggcctcgcgcaacgtctcgtggtacagcacacggccggtgatcagcgtacgctcgatcgacccgtcctcggatacgcgcagcagcgagcccacctgggagatgcggcccatctcatcggtgcgtacgggcacgatctccacatacgcgatgggcatctgatggcgcgcccggttgatgtcggacggccccagccagcccggcgggttgccatggccagaaccgcctccgtggatgaagtcctcgggcgtgatgttgtcgaattcgccgcggccacggccggcatcataatcgccctcgtcgggcacttcatcattcatgactggcatggtctcattatcgcgcgcattgatgaacatgggcacaattcaccgaaaaattgtctgtgaattctcagcaaagcgcctcatcgcctccatgcgcccgcaatccattcagcttggggcacaaacttttgccgaaatgttgggtggtgctgggaaactggtacacagcatcaagcactgtgtttgaggaaggaacttcaatggccgccaccgccatcacttcagctgagtttgagaagaccattactgacaacgaaatcgtgttcgttgacttctgggccacttggtgcggtccgtgccgagcattcggcccgattttcgaagctgcgtccaacgagccggagaatgcgaacatcgctttcgtcaaggtggacatcgacgccaatcaggatctggctcaggctgccggcattcaagctgtgcctacgctgatgattgccaagcagggcgaggtcatcttccagcaggccggcgcgctgcaggcctccgatctggacgacctcatcgcccaggccaaggcgctggatctggccgccgccaaagcacagcaggcagcgcaggagcagcagtaagccttatcacactgcggcaacggaagcgtggaaaagcccatatatagcgtttccttgcactgctaactactacatatgccatccgtggcgggtcgaacacccaccacggattttttattcatccactcaacgtcctatgatggagagcagtgtgtacccaaccaaggagcgcaatgtcgaagcacgctgagcggacctcattcgtcaaaaccctgtctcggggccagtgggcgaagatcgcggcggccgtggccgcagtgggtctcattgccactgcaggcgttatatctcgcgacttctatcagtcgagcaccgctacaccttccatcaccccaacctcattctccgccaccgacggcgcagcttcccgctcggcctcccgtggtgcgctcaagagcaccacttatgtgaccgtcaaggtcaacggcaagtcccgcgtggtcctcggcgaaaaagccaacatgaccaccgtcaaggatgtgctggaaaccggcgatatcgtcctcgatccggaagacagcgtgactccgagcctggattccaaggtcagcgagtccacagtcatttccatcaaccgcgccaacaccacggtggagaccactgacaccgatatcgctttcaatgaagtacgcaaggagacctcgagcctgcccaatggccaggagaaggtcgagaccgagggtgagaagggtgtgctggagaccacgtctctggtgacccgctccggtgataaggtcgtctcctccaacgtgttcacctcctgggtcaagaaggctccggtcgataaggtgattctggtgggcacctccaccgtgtcttcgcccagcgccgccagcctcggcaccaccacgccggccggcgagattcagtcctgggcgcatgactacctgatttccaacggctactccgaggccgacttcaccgccgccaacttcatcatcagccacgaatccggctggagccccaccgccacgaacccgtcttcaggtgcttatggcctgccgcaggcgctgccgggcagcaagatggcttccgcaggtgcagactggcagaccaactaccagacccagttcaagtggtttgtgaattattgcaacagccgctatggttcgatttccggcgcgtacgcgtattggcaggcgcacaagagctactaagccagccaaatcaacacgtacacaacaggttccgcgtcgtaagaaggctgagtgaaacccggcccaaacgccgagcgaactcatgcgcatgatgccggttcccaatcatcggggaccggcatcggcatttctgcgccttatcagccgaatcctcgcattatgcaacgccctagaggtcacttttaccgtgtcatacgaagtgccctccacaactgattatgcgaatccgtgacggcatagcggcacaaagcacgcgtatattgaactggtttgcaacagcaaatggtggaaatgcgcactactgttattcgcggttcctttgacaatttaggctagcacaatcacttactgcttcgactcatctttcggttccgtctgggcggttccgtctgggtctgtaacgcctggctgtgtttgctgttgctgctgcaacaactgctgctgccttaatcgtgcataataatcattcagagctttctgccgcgctgcttctcgctgagcttcaacagctgcactgtagtttgccatggacgtgttgactgcatccatggacgcagtcaacgtgttgacggcatcctgcatggcctttacgtcagtgccctgctgggacagcacggtattggcgttggcgatgtcgctttccagtgtcacgcgcgttgaattatcgtcgacggcatacaggctgttgtccagcaaagtctgagcctcggcaatcttgccctgcaacgcctgctgagcgttagcctgatccttggcgttcttgctgtccgtcacggcctttgccgcggcagtaatcgcagtggcgttcttcttggcggtcttggtctggctagtggccgtcttggcatattcctggaggtccgacgtagaagctgaagtcttgcactccaccgcttccacattctttaccgcagcaattgccttcttcagcgtatctatggtcgcgccgtcagccacttgatcagctgtaatgctttgagcactcttggcgtcggccagcgccttggccagcgtcttctgagcggtggaattctggtccacggcctcagtacatgccgtcaacgcatcctgatgcagccgatggctttcctgacgctgctcactgaaacgccagtaccatacaccaccaatgatcgctgcaatcaccaccagcgcaacaatcaccgaaatgataatgcccttggtcctcttcttgccgcccttgccaccgcgaggagtctctgccacacggtcttcttccggctcctccaccggctcagggttctgttcaatggcactgaagtcgatgttcaaatcgtctatggcactatcacgttgcggcttggcttcaggaactggcgcaaaaagcggcagcgtcgcattattatcctgctgaggcgactgagcactttccgcagtatcaggtgccgcaaaagtcatcggagcagtagccacagcatcggaaggggaaaaggtatcgccagcagtattcgccgcactcgcagtaggccattccaatacttcgtcaaagctggggaagacggactgaacgccacccgcaacagtccccgtaccattgtcaccctgcgcaataccgccgtcgttctcgtcgaacgagatgggcggtatatcccagaaggtatcgacgatgtcaccgcgagccggcgacgtagaggaaccagattccgcgttcggttcagggcgttcgtctgttcccatgctcttctcattcctttgcatcattgaagtcattccaaactgtcagtttatccagccttatgccgagcgtgccagctggtattcaagaatgtcacaattctttactattcgatatacagccagcaccataaatccaacaactcagtcttataacagtaaaccgtgcggcacagaagtaccgcacggtttatattgcaagacgatcggcaaacgccaaactattacttgcgggctttcttctcgcccttgctcttggcgcccttatgagagctgcgcttgttgccgtcctcgtaatagtagtagtaatagttcttcgagtgtatcttcttcggatcagcgaagttgaagatgaagccgagaatcggcacttcagcggcctgcagagccgtagcggtgttctccagctccttcttctccactacgcccttaccagtcacgagcaccagaccgccagccatacgtccgaacacggtggcgtcgttggctacggacagcggagcagtatcgagaatcacgtaatcgtactgggtgagggcctgctcgaccatttccttcatgagatcggagttcagcaagatgctggcgttagccgggcgcgtgccggcaggcatgatgtgcaggttcggcttccaatacttctgaatgacatcggccggggacgcctggcgagacagcacgtgagacaggcccacgtggccttcaatgccgagcttgtgagccacggacgggtggcgcagatcggcgtcgataagcagcacgcttttgccttcctcggcgagagccacggcaacgttggaggaaaccgtggtcttaccttcggacggatcagtggaggtgatgaccagcagtcggccatgaccctgcgtggcggtggtggtaaggaacgaaaggttcgtgcggatgcggcggaattcctcagcctcgctaccggccggctgagcgactacgaccggacggctgtcgtcaagaatcgtagcctgtggcacagtacccagcgaagaagcgtgggtcagctcacgcacatcatcggtggagtccaccttggtgttgaggatgtccttcagcagggcaacgccaatgcctacgatgaggccgagaatcaggcccgcggccagatacagcggaatgttcggggagctctgcccggtaggagtctgagccttctgcactaccgtgagcttgatgggagagccgctggaagaggagttgttgtacaggtcggaagaaatctgatcggccaggttcttcgccacgctgttggcgatgtcggccgcttgctgcggatcgccgacttctgccgagatgtccaccatgaacgtgttcgtggggttcgcagcggtcaccacgccggcaagatcggtcgtggtcatatccagaccgaggtccttaatgacgggctggagcacggcttcggtcttcaccagttccggatacgtcttgatctgggtgttcaaataattggcacccgagctcatatcgttggtggtctgcgtctcgccggactgaccggcatacgtggcgaacacttcagccgtagccgtgtacttcggcggcatgatgaacgcgacagctgcgactgcagcaaacaccaccacgaacgagataatcgccgacgcgagatgcttgcgaataatctgcagcaaatcagcgatggtcaatgttcttccttacctcttcgggaaattttcatagattgtctataatttagcacctaccggggaacttctcgagcttttgtatccgaacaatgaccaaaacccttgatacgactgcagaataactgtacacaatcgcaatcacaatgtattgtgattcaaattatcattcattacaatcataattgtcagtaatttttatgcagtgtgaaggagtatattatggcatccttgcttcaaggattcgaagaagttcagctagttaagcccgttggcaaaacggtaatgaccgttaccgattccgttgtacgttttaataaggccaccgcagaagtgctgaattttccagcacaagttaagatccttattaacgataaaaccagacaaattgccgtcacgccgactaccgctaaggcggataatgccgtgaaattcagcaagggtgaaggcaagcagactacgtctgtaagtatcaagaatgctgtgcttgttgaagcaatttccaagtacttcacgcttgtcgaagctccagaaggcgaggtctctttcgtctctgtcaacggcactgcttacccggaagacaagaccgtgatttttgatgtcgcaaacgccactgccggcaccatgaagcgccgcggccgcaagaaggctgagtgatttctgcttaattcgcgattatacgaataccataaaagcctggatttcgaattaatgataattcaggcttttaatttccaaaaaaccagcatggcttgggttgaacaatacatgcaccagccccacggagaggatctaaacggctgattggcccatagattattcagtttttgtaagcgactgccaattacttggtgggagtttaaaagtacttcatgaaagtgaacggttgaccgaacccccatcacctcacccacacatgcaactggtacagttctcacggaggatatgggagggaaccaagtatgtccacaccgaacaatacgcagctcggcaacaagtcagttcaagaaaaacgcagaaactccggtcattgccccgcgctacagcgtggggcaatgaccgagacgctgactcgtatcaccatcaccccatcagacatgttgatgtttgccgcagtggccatgctgccatttgatggcacaaaaattggcattccactcccctattggacgccaatctccccctggttgttcaccctgtacacaatcatcaactggcgatacttgcgcgataccgcacgccgcttcctgccgttcttcctctttcccctgctactagtgctcacatccgtatacggctggcagtcatatggaatacacgccagcgcaaccacaaagtcattcatctccatattgttagggctggcgtgcttggcttcgctcgacatcgcgatccgcattaaacgtgtacctgtacgaacattgttaactacgctattcaccgcatatgtagtggcattcctcattgggatactgcaatatatcgctttagaacgacatctgaactggcagccagtacgagcatatttttggggtgctctgtatagaaactatgcgagcgttcgtcctcaattcatgttcgcagaacctagctatatcggcatgcatctgttcggcgtactcctgccagttttctggctgacccgcgaccgcaagattggcatattgataccgatatttgccgctggagcaattgcgatgggctccggcacccgaatcatactggatacagtggtagctacatttatctggctgatagcgacaatcaacttccactcacgtaaggtaacagctgggttcgtcggtgctttaggacttcttggagcaggtggattgagcgcaattatcatcaatccgcgtctaaactctttagccaccaatggattacttgctggtgacggatcgatgagtgcaagaatcttccatatgctcgctcccatgtggtcatggaaacatgatctatctcacttcatgtttggatggggcgcaggcaatatctctaatgcagtgcgtactggttacgccggtgcccgccaatggtatgacgcccatggcggtgcgcccaataccgaaatcgacggtttagcaaatcccccagcggatactttcacaatgagcatctatgccagcttcattaccgaatttggtctattttgctttttggccttcttgctcttggtattagcacacgtagcggtccatcatggatggagccgacggaacatatgctggttcattcttctcgcatacctatatattcagtttgaatcatatgcattctatgcaattccactgttcatatgggctgtctgcacaataaagaatcgaggaaaaaacaacatcaattccctttagattgcgagaatcacaattcgctactctctatcatgccgataaagagtgcgcatacgcccgttgtctaattgaaagtgcagcacccgttagattggagattgtccagatagccaaacgaaggggtgttgcgccttgggccaggtgtattcgcacctgtcggaagaggaacggcatgatccgccgccacccgcccaaacgcacgcccatcgccccctccatggcacgcgaactgcaggagatcgtcgacgagaccgacaacaggcccatgcgagtgctcggccaccgcacccccgccgaggcattcgccgacgaactgctagaaccagccgagaacaaggatgttgcacttacaaatagataacggggaccgcgccaccttccacagccgtgccatcaaccggataccgcaatccgcgttcgcagtgtacctgattaccgattatgccgcctccgagaaactgctctgagtccggttgttcaacctgcagaacctgtaccagcagccattggcgatcctgcagattctgggcatcctgctggcgagctacgcgacctgcacactgctcgacttcatccgccaagcactattcgccgtcaccatcggcaagcggcgcggacactggtttgacctgctgtgggacaaggcatccacccaatcaatcctttcgcctgaacacgcaagccaatctcaccgcttccacggaaaaaacaattctgaaatgaaaatcgcacacgtaaggcacaggttgcaccttcttatgccaagtgaaaccagaaaatgtatagatttgtggacacgcttataaaaccatcacttttagcagaaaattgcaaaaatggacatttctagttataatctcagtatcaaaagagtaaaacacatttacgaggcgacccaatgctgattgattttagcttttcgaatttcaggagtttccgcgacgagcaatctttctctatgactcgcgacgaaaggttcacggaatccaacgactcacggcagtctccaatcacagccatatacggcgccaacgcatcaggaaaatccaatttcctgaaggcgatgtgcgccatgcgtagcatggtgacaaacagctacagccaaggtgatgcgaacagcgatattcttagggaaccattcctactgagagagaccccattcgaggaaccatcgatgttcttcctggagttcacagccgagaaccatctgaaataccagtactggttccgctataacaataagcacatattagaggaagagcttaccttctttaaggacatgggaggacgtctctccactcactcctcactgttgttctcccgcaccggaaacgacgaggtgaaattcggagccactttcaaaggacctagaacgcaagtgcgaaagacagtgggactccgccccaacgctctcctgctttcggcggccgccgcagccggcatcgaatgtgtccaacctgtattctcgtttttccagaatgatatggcgtattgcgtggcaaacgctttcgaacaggaacagcccatattgcttgaccaattcaagaacaagacacctttttcgaagcatctgacatctctgatcaagtacgcagattttggcatcagcgatgtgaaaagcgttccggcgaacatcccctcggatatctggcatcagttcaaagaacagatgaagactcagatcggagctgatgagggaaagctagaggaagcattcaacatcaaaaacgcgacacagttgcaattcactcataccggcggagattcgtcctctgccggcttcggcttggataacgagtccaggggcaccgtcgccgcgctgtcgttcttctcgcttgcccttcgtcagctatcaaggcccacggtcacacttatcgacgaaattgacacaagcctgcacccagccttggtagcagagctggtggcgctgtacaccgatccggcaacgaatccccacggctcccagctcattttcacgacccatgacgtgtcattgatcaatcagtcgggttcgtcgaaccgcctactacaacccgatcagatatggcttgtagagaaagataaagacggcgcctcggaactcttcccggtaacggaacttggtattcgaaaggaagagaacatcggcaagaactacctcaatggtgtatatggcgccacaccgaaccccagtttccataccgtattcgcacagatcatgaatggagacgatgactgatggcgaagaagcgaggcgttcccgcgcatggtcgcaagtctgcacgtttccacagggcacgcaagaagcgttatcttgtcgtagctggcggagctgttaccgaaagacagtatttcaagcagctcgagtccatatatgacgttgtcatcgagtatcaacagaagaacgaaagtcctgaacatctcgcagattttgcatgcacgttgaagaaagaggatgaacgggatatctccacagattgctatgaaaacatctgggtggtagtcgacgttgacgacttccacgaccacagcaaggccgcgaaaatttgcaaggacaatggaatcgaactcatcatttccaatccctgcttcgaagtctgggtactcgatcatatgaaggcttgtccaccaagctatacattgacgcccgatgtcgagtcagccgcggcaagagcaggcatcgttggaggaaatcgtaacaaatacgtcaatgacgaactcatcgacagcgaacatctcgatgccgccatatgcaatgcagcccgacacaacacagtggaaaacagtcagggacgaaatagactcacaccacatcacgagcaggaatacgccccttggaccgatatgccgaaagtgattgagacgctgaaatctaataaacagagctgaaagaagaaacatggcacttcccatccaagtaaatcccaaagacccttgcatagatattcacactggacgaggtcaaggtagctgcacattcgcaaatggattcaactgtgtctgttcatgcgcaggtatcgcacacgcccaattactcagaatggttcttactcccgaaaacagtaagaagttgcctgacaaatacaagcaggctcttgccaacaaagtccaaacggttcaagctcgcattgccgatattccgcatgataaggtaacaacaattatccacgcacagaaacagcctaaacgcgtgtttttcctttgcgaggatgtgtctcatcccatcattgactattgccgagtcattgacatactccgttgggcaagagaaaaccccctagcaagccagcaagtatcaaaactctgcacttgtgtacaaaatcatggcattaattctttcaaagatttagcctctaaagccggcgagtacttgtcccaagcacatgttctttgcgacattgtagcctctattgcattcgcactcagcgaagccgcagacacgattccggatgaagatacatttatcaatgcctgcaaagcagcattcgctctctcacgacgtaactcactaggattcggcccatcgcggaaaaggcatggaaaaaacgcagtcgcaacacgcaaatcacggcaggaaaacgatgatgaggaaagccaaaaacgatacactgatggagactccatctcaagtgatctgctcaccaggattttactggatatcagcaaggacgtttacatcctactgatagagtacaaatcccagacgaagcaatttctccaagcggttcaggccacagcaatattgttttgccctgatccggatagccataaattcacatgggacatgtgcttcattccactattccaaacgaaaatctgtgatgacctacgtagcaagttgaatcaagacatcattactgcacttgaatatgggaaaacggatatctgggacaacggggctagggcatactggtaagaagaactgacgtgatgaggcgctttgaagacgcctcatcacgtcagttctctgattcggcacgagcatgatctcgccgtcggcgaggcccttcaaatgctggacatagggtctcttgccgtagcgttccgtggactccatgagctgctcgcgcgtgatccgttctcataggcgatctcctccacgatcgcgatgggcagtccctgtgcgcgctgtacggtgcgcacgcccccatcaacgagctcttcccgacgcaagcacacaaactcatggaagagcaaagcgtgtcaggttcgacacaaaccacactgccctcagccctaactttgcttggattctgcgcccctaacaggatacagcgcaatattctgagcaattaactcattgctcatcaccttgccgaaatcagtccatggccacactgcaaaaggtgaggcatcgtcaaatccatagtcttgagaaataatttccttaactatgctccggggatcatcgccccgctcaatccgatcctggtctgcgtcatcagtgagataaagttcataacgacgcctgccctcatgaatctccctgcgccaccttgcaaacaggatttcatagcctgtgtgtgtgattgaattatcaatcaaatcctgcggatccgaatagactagtccgaaaacatgcggataaaccctatccagcccacatttcttaaacgcatggttgaatgcattgtcgaatgtcggataagtccgtggaatctcaatgaactggatccccgcagcaagtagactgagagcagatcgactcacgatttcacgtttcatttgtgtcttggtaggcatacccaatcttcctttcctaagcaaagccatcgctgcagagccatagacgttatcatgagacactgctctcagactcaaaggaaacgtttcagccaatcaggaagattggaactctcaacagaccaagaatcttgttcctcttcatcttcctcccaagtattctctttaccatcaaagaatttctgacgatgacatttgacttttgtaacctcgtctccttccaatcgatactcattccaatagtggttatgctttcaccatccactccaactccgggttcgataaattaataccattttaatcctcctcgtcgagaaatactcatttaagtttatactaaagattttgagcagaaaagaatcattccagtcaactcttcattcttctctatccccagaatcattattctcaaaagacttatcggcttctgcatggtcagtggaattcgatcgaagcccagtaattccctggaggcagaaagatgaaacactgaccaagagtcctccagctatcagtccaacgagaagattccgagtacaggtggattggcaacggcgtgttggacaggttcttagaggacgagtccttgttgtgtgaattcgttggggctccggtatccgagggtggagcggggtctttggttgtcggaccaccacacataatcgttgaggtcggagcgtagttgttccaggctggtgcagtggttccggtatatgagctccttcttcaggagcctgttggtggattcgaccacggcgttgtcgtacggggtcgcccttgcgcgacggcgatcttctgatgtcgaacacgtcgagcagcccgtcgatcttcgcgttgtcgaacccgccgccctggtccgtgtggaacacctccacctcggtcagggggaagtcgagtgtggcgaacgcggccatgaccaggtcggcggtgcggcccgtgtcggcgccgtggccggcgatgcttgtgtttctgcaaattggcgtccacagtatgggcactatttttcagcagcataggcggctggtttccagcaggaactgcgtcgtcgggtccgccgcctttttcttggttatctggtcatgagggcgtgctcgctgcggtaggagcctccctcgaatccggtgagcctgccgtggtgcacggtgcggtcgatcagcgcggcggccatgttcttgtcgccgagcacgcgtccccagccggagaactcgatgttcgtggtgtagatgacgctccgggtctcgtaggaatccgatatgacctggaacaggagcctggatccctcctcgtcgatcggcatgtagccgaactcgtcgatgatcaggagcctggccttggcgatctgccggagctccgtgtcgagccggtcctcccgcttcgcgcggcgcagccgcatgagcagcccggtcgcggtgaagaacctgaccggtatcgcgcgcatgcacgcgagcctgcccaacgcgaccgcgagatgtgtatttcgtcaagtcggtgtttcgtgtttagtcatgtatttttttcgggtttaggcagttgcatgcattttccttatttttccggttgcgcggaggtgttcctgccgaacatgagggcctcactgacgcggcggctctggccggtgaactcgaggagccgcccgtggtgcacgatgcggtcgatgatcgctgcggcgagtttgtcgtccgcgaagaccgtgccccatttactgaactcgatgttcgtggtgaatatgatgctccgtctttcgtagctgcccgcgatgatctggtagagcaggcgcgccccgtcgatgtcgaagggtacgtagccgaactcgtccagtatgatcaggtcggcacggccgatgtcccggagcatcgtctcgagcgtgccgtcgcgtttggccttgcccagctggaggacgagctcggcggtctgatggaaccgcacgcccagccccgtgtcgatcgccttcatgcccagcccgatcgcgagatgtgtctttccgcgcccggtcttgccgtagaacaccaggtcctgcgcgcgcgggatgaaaccgagccctaggagctcatcgagcatgtagccgtcggggagcctgacgttcgtgaagtcgtagccgtcgagacccttgacgacggggaaccgggcgcggcgcaggagcctgtcgtgcttcgcgcgttccctgttcgccagttccgtgtcgagcaggcggtggacggcgtcgacctggcggggcgtggcccagccggcgaattcgtcgatgctcgccttggagatgaacagcttgcgggccttctcgtagagcccttcgtccgtcttcgtgttcatcgcccgccttcctgcacgccgacgtccgcggtgaacgcgatgtcgtattcacccggatccggcctgtcatcgtcgtattcgatacccgccacgccctcggcgagcctggccgcgagcagtgtgacaccggcgcggtccgccccgccggtcgattcgaggatggaaagcatcgcctcgaccgcgttcgcccacccggattccctgtcaacgcgtttgagggtctgcagcgcctcgttgcgtgtctgtctgtcctgccgatccagccattcccgcaacgggtccggcaacgcgtcacgtacccggctgttgggccaggacgcgggcttgttgcacagcagcgccaactgcatggacgggtcctcgctgttcgtgctggcctggccgtacgcccgaggatgggtcgccagatgcttgcccgacgagtcgaggacctcgacctcgagcgcgcggaggcccacgatcacccctctgcccgcgttcgcccggtccgcggaacagcgatgccgtccccgggcgcggccacgccgtaccggtcggccttcatatgccgccacgtgaccacgtcgaaacgcttcccgggcaacggcagcagcgccgcacggtcctcggagaacaggccacgttcctccgtgtccttgcggtaatgcggtttcgtggccagctccaggcaccggtccggcagcccggcgctgaagttctccaggctccatacgctcggccggggcacgaacagcttgcgccgcaccatgccgaccttggactccaccgcgcccttctcatgaccggaatacgggttgcagaacgaacaatcgaacccgtaatgcgcctggaaggcctggaacaggtgcgtcaggcgcggctcgcgctccccgtaccccttatggcccacgccggcggcgttatcgaacacgatccgctccggcacaccgcccagccactcgaacaggttgcgcaacgccaggcacgtgcactcagcgttctcgcccggcatcaactgcaccagaccgacgttcgaatacgggaaatcaagcacgaaatgatgcatccgctgcaccacgccgcgcaacagcacgtcgacctcgccgaaatcggcctgcgcctcgcctggatgccataccagatccatgaacgcctcatcacgctccgccgcgaactcacgcctgagccgcgccaccgcccgcgtcaccgtggacagggagacctccgcgccatgctcgtccctcaaccgctcccagatcctggtcgcggtatgccgctgcttgcgccagttcgcgcgatcctccgcgagccactgctcgatcacgggcagatacgggtcgatcaccgacgcgcgcggctttctcaccgacggcacggccgacagatcctccttcgcgaggtacttacgcaccgtcggctcgctgacatgtgttttccgcgcgatcgacgcgacggattccccgttccgccgcaaacgacggatagactgtacttggggcatgctgatcataatcctttccggtcctttctggcggagatacaagcaccatccagttaagaccattccgtggtcggcatgctctgcctaaacccgaaaaatcatcgtgactaaacccgcaacaactaattgaacacaaacactcgtggatgatgcactcccgccccgagccgatgaaggacttcgcccgcatgatccgacgccacttcgctgggatcgtcgcatacttcaagcacccgtacaccaacgccgtcctcgagggcgccgacagcgtcatccagaacgtcaaacgacgggcccgcggcttcaggaacatggaccacttcgccaccatgatctacctgacctgcggcaaactcgacctcaaagccgtcaccaccacttgaccatcacccaccacaaacagcgaatagccgtaataatttacgttttccaaccaaatttgagccctgttcttacgttttataaccagaataaggtgcactgggctacgttttccaactttggtgtctagctgggctcggaccagctatggttctgaaactattctgatggatttaccgcagttcgcctgccaagtatggctccacgaatgcgaggttgctaccgcgttcgagtgagtggaggtcttgcatggcatattgccaagattcctcccacgttgtcggattgccgtgtatgcgccgaagagattgaagggttgtagagaacaggttcgggttgcgggtaaagcggtctgctagtttgatggcgctgctctgcttgtgctgtgcgtctagattgtcaatcctaccgcgaaatgcgtgttcgaggttgcggctgacgtagaacaggcggtacgggaccatgagcgtggcacggccgttcttcttcctgaacccatcgagtttcagcaaggcatccacgccgtttcgcttggtcgtgcgatccgcaatcaggatagtgcggtttggcgtgatgatgtcggtcgttgaatattgcgttccatccaccaatgggtcttcccgcactcggtcgtcagatgtgaacgccccgtctaggtcgcagatctggatgacatggccgagctggccccaggcgcggtcgtggtctctgaggtagtactccacgagttcgcgcaccgtctgggcaggattgtccgctggatagaacccgttacgacgccggaactcctcacggtggtttggcgcagtcaacacgtcgcagtggaattcctgcccttggaataggcggttcttgattaacgacgagaatgccggcacgagcaggctggcgtcgcttgctccttctacgaccagcaggacgatcttgcgtttagccacggttcaccttcgttccggaggtgttgagtgctgccagatcgtcgtcgatgtcatcgtcctcatcgggatggccggcggcatagagactgttgccgaacatgcgtggtatgggcgaatcatagatgtcggggccgctccagccgagctcgctggccgtcaggtaccgtcggcgctggttgttcgtggaggacttgcgggggatgatcgcgaaccggttattgggatcggtcactgtagtgcgaatgcagccgttcggcagcacttccaacgcacgcaggttatgggcggtgaacaccagctgccctgcgcacccgtccgccaactggtacagcatgtcaccgagcagcaactcgaacacgccggagtcgaactcatccacggcaaccagcgcgttctcgtcgttatacgcgtgcttgagatagccaagcagcgcggtgatgcgtatgatgccttcgctctcacagcggaatgggaccgtgatatcgccacgacgcgagaacagctccgcggtgacccggtcctcgccatctttgccggaaggcgcggttccgatcttcagcaggacatgcagaccaggcacgagggtgggcaggatgcggtcgaaggactccacggtctgtccaagtcgtttcgcctggcccggggtcagcgggttcggttgcaacaggtcgaacagaaactctgtgttgcgacctgcggaatcctcctccatgatggggatgaacgcatatgcggcataggagccacgacgggtagtggatacgaagacatcattggtcgcgtaatcgcataaggccttgcgtaggcgtacgaactcatcgaaacgttcgttgatgtatgtcagtgatctggcggacacaccattcgcttcccgcacgcgggagaccacccagtcgatgaggaactcggcatcgggtcggtcttcaagcgcggcacaccgcgagaacaggaatgagcgcccctccatgtacgcacgatcagcggtgcgtgagaccacggttttcaccgaggtgaccgcctcgatggagcgccacacatataccggagttgacacgaaaccatcggtctcagaatcctccatccgatgccccaacgcctccctgcctaggcgtgagagatcgtcgccgatgcgaaccgactcggaaacgacgcgcgctcgcgtcgaatccggattcgctctacgcagggacaccttgtattcaaggtagctgggcttctgttttcctccgatgaggagcgtcgccgtcaaggttgcaagaccggtgctgacgctaatggcatcgccggcggtgtccggcagcatattcccggatagcagcgcgcgcagtatcccgatggcatcgataacggtggtcttgcctgatccattctgtccatagatacccgttacgctgccgccagcgggcagatcgtcaaaatccaagacgccgtgcgatatgttcctcatgttgtctagaacaagtctttgtaaacgaatcatcgcattaccgttctttaaaagtcataataatcaatttataattgaaatatatgattattgtacaacataagatatattttcgccaccaaatctcgcaatcggtattcattgattgcgctgtcagtgacctatcggcggcctgtcaacggcctatcaatgaccctgcttccggtacttttcctcagtcccggccttatccggcatccaccagctttcgtgcgcacggtaccagtcgatggtcgcggccagaccttccttgaaatcggtgtactttggcacccagccgagctcggtctgaagtttggtggcgtcgatggcatagcgcttatcgccaccggggcggtcgttcacatggtcgaagtcattggcgtcacgacccatgagcttcagaatcatgtgcagcacatcaatgttgttgtattcgccattggctcccacgaggtaggtttccccgatgcggcctcgggtgagaatagtccagatggcactgcagtgatcttccacgctgatccagtcgcgcacagccagaccttgcccgtagagtttcgggcgaatgccggcaagaatgttcgtgatctggcggggaatgaacttctccacgtgctgataggggccgtagttattgctgcaattgctgatggtggttttgagtccgtgcgtgcggtgccaggcgcgcaccaagtggtcgctggcggctttggacgccgaatatgggctggacggtttgtaagggctgagctcggtgaatttgcgctgttcgtccagagccagatcgccatacacttcgtcggtgctgatgtggtggaatcgaatatcgtggcggcgggcggcctcgagcaacacgtacgtgccggtcacgttcgtattgaggaatggggaggcgtcgagaatcgaattatcgttatgcgattcggcggcgaagtgcacaatggcgtcaatcgggggtactgcggctgctgagcgttggttcagcccggaaagcagggattccacaagctcggcatcgcaaatattgccatgcacaaaggtcaggttcgcggctggcacaccatcgagattctcgcgcttgccggcatacgtgagcgcatccaaaacagtcatatggacctgtggatggttacgcgccacccagtgcacgaagtttgcgccgatgaaccctgcgccaccggtgaccagaatgtgttgcggcgcgaatgatgggttggttgcttcgttggatgctttgttgactgcttcgttggttgagtcgagggcctgttcggaattgctcatatctaccaatcgtaacctgaggtttgcctgagtgcgggggcttatattggtggttgcgttgttctgcgctctgtctttgtggcggcgaacgggtccgggcaaagacacagaaatgtaagaacatgccatgcattgccttgagtctgtcgtctggtcttggattgtgtccagttttctggtcagtctaggaagattgccgatttgcaattgggtgagtaagatattttctcggaaatcgaacataataattgatatattgactttatgaaagggaatgcgcgcatgccggaaactactcaatacccagacctagtcattgtcggcgcgggcctgtttggcctgacggtggcgcagcaggcggtggagcatgcgggtgcccgtgtgcatatcatcgacgtgcgcgaccacatcggcggcaacgcgtactcgtacttcgatgaggagaccggcgcggagatccacaagtatggcgcgcacctgttccacacgtccaacaggcgtgtgtgggactacgtcaatcgtttcacgagcttcacgaactatgtgcaccgcgtgtatgccacgcatgacggcgaggtctatccgctgccgatcaacctgggcaccatcaaccagttcttccatgcgcattacacgccggccgaggcgcagaagcttatcgccgggcaggcgggcgagctggccggcaccgatccggccaacctgaacgacaagggcatccagctcatcggccgaccgctgtacgaggcgttcatcaagaactacacgggcaagcagtggcagaccgaccctgccgagctgccggcggccatcatcaagcgcctgccggtgcgcttcaactacgacaaccgctacttcaaggacacgtgggagggcctgcccgcggacggctacaccaagtggatggagcgcatgatcgatgacccgcgcatcacggtttcgctgggcgtggacttcttcgacgagtcccagccgtacaacaaggaggcgctgaaggccgcgggcgtgccggtggtgtacacgggtccggtggaccgttacttcggttacgagcttggcgacctgaagtggcgcacggtggacttcaaggaggtccgttacgacgaggacgaccacttcggttgcccggtgatgaacttctccgacgctgacgtgccgtacacgcgcgcgatcgagttcaagaacttcaacccggagcgccgcgatgcccagaacccggacaagaccgtggtgtgggaggaatacagccgtttcgccgagcgtggcgacgagccgtactacccggtcaacacggatgcggacaaggcactgtacgcccagtacgaggccaaggccaaggccgagccgaacaccgtgttcggcggtcgcctgggcacgtacaagtactacgacatgcacaacgtgatcgacaccgccctgaccgcttacgaggagcaagtcgcaccgctgctgaagaagtagaccgtcgtttcgccagaggattaacgattgagcctgaaaccgactgaatattgctgaggcaatagccggtttcaggcttttgtgttttttggaagccaaatttcctggggtgcttaaggctcgccacgaggagtacagttgtctgtaacgcacaatgtggcgcgtaagacgaggggcgcatctcgcaagtggggtgcgatgcagttgaaggagtgcatgtcatgactgatccgaatgtcaatccgaacggccaggtgccgtggcagcaagctgacgccaatccgactgagccgttaaatgcgatgacggcggaaacgggaaccgccgccaacaatgctccgacccaagcaatcgcagcgggcgagcagcccactcaagcgttcactcctgttgaacagcctacgcaggcgtttacacctgccgagcagcccacccagccttttgcgccggccaatcagccggtaccgcctacgcaggctttgccaccagtgactcctgccgctgcgcccgcgcccgcaccggcagcgcccgcgcctgcgcccgcaccggcagcacccaattcgccctatccgggggcggctccggcaggcggatcggttcctccggtctacggcagcgtcagtgctccggtatatccgggcggcggggccgtgcctccgcaaacgccctataacccgtatatgcaaggcggccaaccgaacggccagccgggatggtctggttcttacggcagtgtgccgcctgaagcgaaccagaagtacaacggtctggctattgccggttttatctgctcgttccttgtctcactcctcggtctgatcctgagcatcgtgggcctcaaccagattaagaaacagggcggcaagggcaagggcttggccatcgccggcatcatcatcagtgcggcgggcatggtgatacaggtaatactggtcatcgcgctgatcgtcggcggtgcctcgtatgccagcaaggctatagatgaggcgaaaaccgattccttctatagtcagtcctcttcgggcagcggtgatagcagcgataagagcaaagctcaagataatcttgacgatgcgctggacgacacgttgggcgaaacccatgacgatctaaccgacggcgattatgggctgtacgattcgattcaggatttcgtcgactctttggaattcaaggactccattgaatccgaagcggatacgtttgcagacaccggcatcaccttcaactaccgtgtcgacggtgacaccttggtgtacgagtacgtgctcgacgacagctatgcctcgctaggcgataccgccgcttcctcactggatgctatggacagcacctatcaatccaccgcgaatctgctgggctcgatgtgcaagacctccagcggcaaggcatcattgcgcgtcatcatgcacacgcaaagcggccagtcgctgtatgacaaaacctggaccgaaaagtagcaatcccagcgaacgtgcgttttggtcgattgaaggccggtctgcttgctccttggacggatgcttctgcggaaggaaccgccaaggagtaggcttacaggcatgagactcgcacgtttttctttgaatgattcgccgcgctacgccttcgtgcagaaggacgaaacggacggcaaggactacctcatcgaactggacggccatccgctggccggcgaccaggtcaagcccaccggcactcgttacccggtcgacggcgatggcatccgtctgctctccccggtcatcccctccaaggtttacggtctggccaagaactatgaggcccacgcccagttcatgcacgaggccggccactccgaaatcgcccacgcgccggaagacatggtgatcttcaccaagccgtccacctcggtaatcggccccgacgacccgattgtgtacccggcctgctccaaggacatgaacttcgagccggaagtggccgtggtgatgggccgtatcgccaagaacgtgaccgtcgagaacgcgatggattacgtgctcggcttcacctgcgtcaatgatgtgacgttgcgcgatctgcagggcatcgaccccacgtggacgcgcgccaagggcttcgatacctcctgtccgcttggcccgtggatcgtgatgcgtgacgacctcgactggaaggacgccaagatttccttcacgctgaacggcgaggatgtgccgatggcgtctggcaccaccgcgaacctgattcacggcatccccgagcagattgccgccatttcgtcgttctccacgctgctgcctggcgacgtcatcatgaccggcaccccgaacgcctccggccacctcgacccaggcgacgagaccatcgtgcacgtcgaaggcatcggtgatctgcgcaacgtaatcgttcgggcgtgactcgttctggctcccctctctgaggggaaccgtccaggcggagaagctgactgagggaaccaagaacgcgccttacgctcccggcagaagtgcgtgcagggcggtcatcaccaccaagctgatgatggccgtcactgtcagcgagaagccggcgagcttggcgttgccggttagcgaatcggtgaacttggttgagaagatcgtgatcggggcgaaggagcccagcacgatgatctcgcgaatcctcatgtcaaactgccggccgcgccgagacgccgggacagttccgtgccggcaagccgcagcttggtcttaagcgaccgctcctgttcggggcgcagcgatccgctcacgaaagtgagagccagcccggcgatgggaaagtcgttgtagtcgcgcacagcgacggcgtatgaatcaaagccgggcgtcacgtctccgtgttcctcggcaaaaccggtgcgttgggtttcggcgagcgttgcctccagctccttgggcgatttggggccgatgccggtgcggtcggtgaacgcctgacgattgggatatagcgcgcggacctgattgcgggggagtgcggacagaatggcccgcccggtggcggtcaggtgactgggtaggcgcacgcccacgcctgacactagcggcgggcgatgtgcggcgcgctcctcaatcacataaatgatttcgttgccgtgcagcacggccagatgtccgttttcgccggtctcgtcaacaagacgcgccaacaccggatgcgcgacctgcgatacacgatgttggcgagaataggccgatcccagctcgaaagtcttgagtccgatgccgtacgcgcgctgctcggcaaggcgggtgaccagtccgtgacgctccaaaatctccaacaattggtacaccgtggagcgcggaatgccgagttcgcgagcgagcgtggcggcttgcgtctgaccattgctcgcgatgaactcgaggatgtcgagcgtacggtcggccgccggagccagcgagacacgtggcgcggatgatgatgtctgatgttcccgttctgatggcttcacctgcgcccgcttgacggtacgtggctcggtgaaggcgtattgctgcgaggcatggctcatatttccatcaccttacatgtctgagatttcagacacaagatggacgaagtggcttatggcgggcatccgactgaggtgaaatggccaaggtttgattactcggggagcgattggtcgcgtttgcgtcgcctgctgttgatgggcaggtgcggtgagcgaatgcgggcagtcgcggatccccggcgaagcatgtgccgcatatgtcgtatatgcggaatgcggcacatatatagaaaggtatgagcatggcagagcagacggtcaccgtaggtgttggagcgctgagcatcgaggacgttatcgccgtagcgcgcggcggtgccaaagtggcgatttcggacgaatcgaagcatgagatggcgctgagtcgcgcggttatcgatcatttggccggcgacaccgtgccgcattacggtatctccaccggattcggcgcgctcgcctccacctccatccccaaggaacagcgtgcgcagctgcagaaaagtctgattcgctcgcatgccgccggtgccggaccggaagtggagcgtgaggtggtgcgcggcctgctggtgctgcgcctgagcaccctgtgcaccggacgcaccggtgtgcgcccggaaaccgcgcaggtctacgccgatatgctgaacgccggcatcaccccggtggtctacgaatacggttcactcggatgctccggtgatttggcgccgctcgcagcctgtgctttggtggcgatgggtgaaggcgaggcccgcaacgctgacggcctcaagatcggcggcggcgaagcgctgcgtgcggccggcatcacgcccgtcgatttgaaagagaaggaaggactggcgctggtcaacggcaccgacggcatgctcggcatgttgtgtatggccatcaccgatctgcgcctgctgctcaagaccgcggatgtcgccgccgcgatgagcgtggaaggcatgctcggcaacgaccgcgtattcgccgccgacttgcaggcgctgcgcccgcatcgcggccaaggcgattccgctgcgaacatcgcccgcatgctcaaggactctggtctgattgaggccggccgcccgggctccaccgtgcgtgtgcaggacgcctactcgctgcgctgcaccccgcaggtgcacggcgccgcccgcgacaccgtggaatacgcggcctccgtggcgggcgtggaactcgcctccgccatcgataacccgtgcgtcacgctggacggccgtgtggagtccaacggcaacttccatggcgcgccgctggcctatgtgctcgatttcctggcgattccgaccgccgacgtagcctctatctccgagcgtcgtaccgaccgcttccttgacgtggcgcgcaaccgcggcctgccggcgttcctggctggtgacccgggcgtggactccggtttcatgatcgcccaatacaccgctgccggcatcgtctccgaaatgaagcgtaacgccgtgcctgcctcggtcgattcgattccaagctccgccatgcaggaagatcacgtgtcgatgggttgggccgccgcccgcaagctgcgccggtcgattccggcctttgcgcgcgtgctggccgtggaactgctgtgctcctgccgctccttcgacttccgcaagccgtaccgtccgggtgcggcgggcgccgccgtataccgcgtggtgcgccagtacgccaacgaaatcggccccgacgtacgcgatacctggaccaccccgcagattgagggcgtggccgaggcgattctctccggcgaagtcctcgccgccgccgaatccgccgtcggcgcactgaagtagcggctgcccaagcttcctcatcagagggggctactagtcaccctccccaccaaaatccaaaacttgagtcatatgcactcaagttttgggaatagaatgggttccaggtcggttgaccatatcagacaacgacaagctgcggtctgtcgcaacgctcgcagggctttcgaagcccgcgagccgcactgcgcagaccgcatgatatggaggaatacgatatggaacagaagttcaccactatggcccaagaagccgtcggcgacgcgattcagagtgcgtccgccgcaggaaacgcgcaggtcgagaccctgcacgtcatggatgcgctgctgcgccaggaaaacggcgtggcgcgctctctgatcgaggccgcgggcggggacccgcaggccatcggcgcggcggtgcgcaacgctttggtcgcgctgccgagcgcatccggatccagcacctcgcagccacaggccagccgccagctgaccgccgccatcgcccaggctgagaaggaaatgcagcagatgggcgacgaatacgtctccaccgaacatctgcttatcggcatcgcggccagcaagccgaaccagtcggccgaaatcctggagaagaacggcgtcaccgcagcctccctgcgcaaggccgtacccggcgtgcgtggtggcgcgaaggtcaccagcccggacgcggaaggctcgtacaaggccctggagaagtactccaccgacctgacggccgccgccaaggaaggcaagctggacccggtcatcggacgtgaccaggaaatccgccgcgtgattcagatcctctcccgtcgtaccaagaacaacccggtgctgatcggcgagcccggcgtcggcaagaccgccgtcgtggaaggcctggcccagcgtatcgtggcgggcgacgtgcccaccaccctgcaaggcaagaagctcatctcccttgacctaggctccatggtggccggctcgaagtaccgtggcgagttcgaggagcgcctgaagagcgtcctgaacgaaatcaagaacgcggacggccagatcatcaccttcatcgacgagattcacaccatcgtcggcgcgggtgcggccgaaggctcgatggacgccggcaatatgctgaagcctatgctggcccgtggcgagctgcgcctgatcggcgcgaccacgctggacgagtaccgcgagaacatcgaaaaggatccggcattggaacgccgtttccaacaggtgttcgtgggcgagccgagcgtggaagacaccatcgccatcctgcgtggcctgaagcagcgttacgaggcgcaccacaaggtgacgatcggcgatgacgcgctggtcgccgccgcgaccctctcgaaccggtacatctcaggccgtcagctgccggacaaggccatcgacctggtcgatgaggcggctgcccacctgcgtatggagctcgactcctcgcctgaggagatcgatgagctgcagcgcaaggtgacccgtcttgaaatggaggaaatgcagctcaagaaggccgaggatcctgcgtccaaggagcgtctgggcaagctgcaagccgaacttgcggacacccgtgagaagctcagcggtctcaaggcgcgttgggatgcggaacaggctggccacaacaaggtcggcgacctgcgtgccaagctcgacgacctgcgcgtgcaggcggataagtatacccgtgaaggcaacttggcggaggcctcgaagattctgtacggcgagattccgtccattcagaaggagcttgccgccgcggagagcgcggatgctgaatctgctgatgccagcgcggccaacccggccgatgagccgatggtcccggaccgtgtggacgccgactcggtggctgagatcgtctccgactggaccggcattcccgtcggccgcctgatgcagggcgaaaacgagaagctgctgcacatggaggactacctcggcaagcgtgtgatcggccagaaggaagccatcgccgccgtgtccgacgcggtgcgccgttcgcgtgccggcatctccgacccgaaccgtccgaccggatcgttcctgttcctcggccccaccggtgtgggcaagaccgaactggccaaggcgctcgccgacttcctgttcgacgacgagaaggccatggtccgcatcgacatgtccgaatacatggagaaggcttcggtctcgcgcctgattggcgcggcgccgggctacgtgggctacgagcagggcggccagctgaccgaggccgtgcgccgtcgcccgtattccgtggtgctgttcgacgaggtcgagaaggccaacccggagatcttcgacgtgctgctgcaggtacttgacgatggtcgcctgaccgatggccagggaaggaccgtggacttcaagaacacgatcctgattatgacctctaacctcggctcgcagttcctcgtgaacgaggacatggacgccgacgccaagaaaaaggccgtgatggacgctgtccacatgaacttcaagccggagttcctgaaccgtctggacgacatcgtcatgttccacccgcttacgcgcgaggagcttggcggcatcgtggatatccaggtggctggcgtgtcccagcgtctgaccgatcgccgcatcacgctggacgtcaccgactcggctcgcgaatggcttgccaacaccggttacgacccggcttatggcgctcgtccgctgcgccgcctggtacagaccgaagtgggcgaccagctggcccgtatgctgctggccggcaaggtccacgacggtgacaccgtgctcgtcgaccagaccggcggcgaacatctggagctctccgcttgggcgagcgaccagattgtctccgacaatccggacgtgagcgtggacaacgtcaccgaagacaagtgacaatcactggctcccctctctgagcaaagctgtcagcgaagctgactgaggggagttcgggctggcgagcttcactatattggctctcctctgaggaggagagccttttcgctaccatggtgctgaacttcatacgaggagggccagtgactggacgattcgcgccgacgccgtcggggcgcatgcatatcggcaacgtgtacgccatgttgggtgcatggctttcggcccgctcgcgtggcgaccgcatgctgatgcgtatcgaggacgtggacaagccgcgtgtggtcgccggtgcggaccagctcatgatggatgacctgcattggctcggcctcgactgggatggcgaaccgatgttccaatcccagcgcactgaacgatacgaatacgctctcgaatgcctgcgctcgcaaggtgtgctgtacccctgtttctgctcgcgtgccgacattcgcgccgcctcggcccccaacgagggcgacggcttcatggtgtaccccggcacgtgccgccgcctgctgcacgaccatcccgacgaggtccgtgcccgtttggttcgcggcgaccagcattccatccgtatcgccatgccggaatcggcagcgggagaaaagcaacgtacagtgcctgacgattccgctgcgctgtcgggagccgtgccgccggaacagcagggcgatgccggaatcgttgatggtgtcgcatgctttaacgaccgtgtctatagtccacagcactacgatttggcccgcgaggtaggcgattccgtgattcgccgagccgatggactgttcggctatcaactggtcgtggtcgtggatgacctcgatatgggtgttgatgatatcgtgcgcggccgtgatctgctgcgctccaccgcgctgcaaatgtggattcgccagtgtctgttggctggcggctttgagccggaatgcggcaacacggaaaagcctctcgccgagcaccccgagtatgcgcacctgccgcttatcgacaatgcggccggccggcgtttagccaagcgcgaacgttcgctggatatgggagccttgcgcgcccgcaacgtaacccccgagcaaatcatcggatactgcgcctggctgctgcgtctgcaacccactccaattccttgcaaacccgccgatctgctggcagatttcagctgggagccactgcgcgccaaccacctggaccgcgcgctgaaaccggatgatccaaccactccacaatggctggcagaagcgttaggctagaggcagcccaacaggaaggattccaatgtcgtcgaagctctggagaaacgtggcgctggcaggcgtggccgccgccggtgctgccgtgtgggccgtggccccgcgcacgttcaatgacaagcgtcgtaatttcgtgccctccattccggaggtatggtatgcccatcgtggcttgcatgatgcgggttctggtttggtcggctatatcgatatcgctgattatggtggggataatccggttagcgcccaagccgataccactgagcgatccatcgccgaaaacgatgattatgtgtcgcttgcccgtcgcatggctgtcaaggccggctacggcagtgcggatatgaccggtccgattgctcccgaaaactcgctggccgcgttcgccgccgcctgcgaggctggctatggcatcgaactcgacgtgcagcttacgctcgacggccaagtggtcgtggtccatgacgccgatttgttgcgcgtggccggcgatccgcgccgcatcgaagacctgacttacgacgaactcgcccgtattccgctcttcccgaacggcgagtcaggcgatttgaaggccgaaccgttgccgggtgccgacgcgaacccgccgctggtggtcacgccgtccgccgcgccgaaggggtactaccagcatgtgccgctgttctccgatgtgctggacgtggtggccggccgggctccgctgattgtggaatacaagttcagcaacaacagggcttgggatgagcgtagcgaagagctcatggaaaagggccacgccttgcttgaggcgtatgacggcccgtacgtgatcgaatccttccacccgggcgcggtgaattggtacaaggagcatcaccctgaggtgtgccgcggtcagctgagctggccggcgaagctgagcaagaatggtgcggctgaatgggccgccggcttactggcgttcgactggctgtctcgtcctgatttcgtggcttatgactggaccggtggcgcttcgccgcaagtcaagctcgctcgttcgatgggtgcgatgccggtttcatggaccgtgcgcagcagcgatgaactcgcccagtgcgccccctacttcgaccgccacatcttcgaagcgttcgtccccgacgcagtgtgaggttgagggcgttattgatgcgcccatggggtggttacaggctcatcgggcggtaacttgcccatggggcggtttgaagaatatgtgaaaccgcggaattaagccattttggcataccgccccatgaggattttgccgcctcatggggcaattaccgccccatgggggatttcccgccccatgaggtatggcgttttacttgtgatacggctcgccagcgttgattttataagcgcgatagatctgctccagcagaatcacgcgcataagctgatgcgggaacgtcatcttcgagaaactcagcagaaaatcagcacgacgcagaatcgcgtcgtcaaggccgattgaaccgccgatgaccagctgaatatggctggtgccacgcaatccaaggtcgttgattttggcggccaattcttcactggacagctgcttgccattgatggcaagggcaataacaaacgcgccgtccttcagatgcttggcgatgcgttcgccttctctggccttgatctgtcggtcaacgccttcggaggcatggtcaggcgttttctcatctgccacttcaatgatgttgagcttgcagtagcgcgaaagtcgcttggaatactcgtcaatggcgtcgcgaaggtaacgctccttcacgcgccccggcgcaataatgtcgatttgcatagatgttccgttatgttggctcccctcggggaggggagccagggaaatcagtcaattacgccatagagacggtcaccggcgtcgccgagtcccggcacgatgtagcacttgtcgttaagacgttcgtcgaccgcgcacaccacgaccttgaagtcgatggacgggtcgatgtgctcctcgacgtacttgatgccttcgggggccgcgatgatgttgatcgcggtcacgtccttggcgccgcgctcggccaggtagtgcgtggcggcgaccagcgttccgccggtggcgagcatcgggtcgatgaggaagcactggcggccggacaggtcctcgggcagacggttcgcgtacgtcacctgctgggtggggtgctcctcgtcgcgcttcatgcccaggaagccgacttcagcagtcggaatcaggcgggtcatgccgtcgagcatgcccaagccagcgcgcagcaccggcacgatgatcgggcgcggggaggcgatcttcttgccggtcatcggggcgaccggcgtctcgatcggcgcggccaccacggacaggttgcgggtggcctcgtaggcctcaagcatcacgagttcggagacgagctcgcggaaggtggaggagggggtgttcttgtcgcgcagcacggtgagcttgtgctcgaccagcggatgattcaaaacatggagttccatgattcccagcctagtccaagtttgccgacctgccgaattggtaatggcgcggcttgcttatcggattggatttgtgggtgattcgactttttgctgcgataggccagttgcagcaggacaatgccctgtccgtgccgagatctgcctctgatacctctgagagggtaaagcgtaaaaaacaacacggtgtaaaacagggaatgaaactggtgtaaaaccgggaatgagataggtgtaaaatcaggaatgaaactggtgtaaaatctatattgttagaacgatagaactgggaaaggctgcaatatgaacgatttgagtggtcgcgatggtaccttgaccaggcctgattatcgttcacgcgtggtagatagcagattaagtaaactgctcaaggcgttcggtgcagtggaaatcgttgggccgaaatggtgcggcaagacatggaccgcgctctcccggtctcgaagcgttgatcgtctggatgatgtggcagttttcgcggccgcccaaaccgatcctgcattggtgctgatgggggaggagccccatctggtggacgaatggcaagatgtaccgcaaatttgggatgccgctcgtcgccatatagatgacaatgcgaaccgcaaggggcagctgattcttacaggttcggctattccaaaggatcgtgacgccattcatcacagcggcactggtcgcattgctcgtctgcgcatgtggcccatgagcttggctgaatccggagaatccacgggcgcggtcagcctatccgatttgttcgaggggaaattcgagcctgccgaatgcaatacgagtatcgaagacatcgccagatggtgttgccgtggcggatggcccgcgaatcttgagctagacgatgaattcgccttggaaatcccgggcgaatatatcgcaagtgtgctggatatcagcgtgccgaagatgaagaagaatcctgaaactgcacgagctttgatgcgagctcttgccgtgaacatctcgcaggcaccaaaatatgcgacgctggctgcggatatggcatatggcgatgagcggcgtgagccggatacgcagacggtgaagagctatttggaaatgttcaaggacttgtaccttctgacggatttggagggttgggaaccgccactccgcgcaaagagtcgtgtgcgaaccaagcccaagcgatatttcgtggatccttcgttgcctgctgcggttttaggtgccgcgccgaatactctgatgcgcgatacacagacgctcggcgatctgtttgaaacgctgtgcattcgtgatttgaatgtatatctgtcggctatgccgggtgccgggaatcgcattgcgtattaccgcgatgacaaggggcttgaagttgatgtcattatcgagttgtctgacggcaggtggggtgccatcgaaataaaactcagtgaccttaaggtgaacgatgacaatgcggataagctcaaatccttccgcaacaaaatctgcggcaatcccatggctcaggtccgagaccccgaattcatgatgttccttaccggccgaggtgggaaggcctatcgccgcaatgacggcatactggtcgtgcccatcgcaacgttcggggcgtgaatctggtaaaagaaaagaagcgccgaaccgcgaaagcgcctgtcggcgcaagggccgctcgcggcggcaaaaaatggagcccggggcttaagcacggtccgacgcggatacttagtatagcttgcgatgggtctcgccgcgccggggaaggggtggcgttggccggtagctgattgttggggtgcggtcggtgggtttctccctcagtcatgggcatcgcccgtgacagctccctcatcagagggagctgtcacggggttactccaaccgtccgcgacgccagaggttggcaccgtgttggaaatccttggcggtggccatgaggctgccggcggtgtgcataaggcgggcggctttggtgcgcacggccttctcatcggcatccgaggagaagccgccgttggcctcggcccgggtcaccatgcgccgcgcctccacgcgcaagcccaacgccaccacatcggtaaacgccgccgcacgctcaagcgccacggcaaaatcgcccacaaaagcaccggagagaatcgaatcggccaatcgcacgatgtcatcttcactgggagcctgatccacgccggcgatggcggaggcggtagtggccaccggctcacccaagcgccacagatgcgcgatcgagtcgcgattcgatcgcatccacgtacgcaacatatacagtcgccacagcacaccaggcagcgaatccggctcggtatcgctccatagttcggcgatttcatccacgccgaccgtctccaccaacgtgagcacccgctcaacaaccgccgggtcttcgctatggcgcacacgatccagcaatgcggcagcagacagatgactcatctcgctcaacgcctgcgggtccatgccaccggccaatccatcggccacagccgggtcgagctgagccgggcgcgaggggcgtgaagaacccatgcgagcaggtccgaatgccgctccggccgcacgcaacgagccgaagcccgggcccagactgccggcggcaccattgtgcgcggcatgagctgcagcggcagcggccgaggagttggatgaatcaggaaatgcgggtctagtagacaagcggttgaaccttctgaatatcgatgattttgggaccatgaggcgtcggagtgacgaacagcgccaccgccgtgccggtcggcatgaacggtgtcttggcgatcaggcgtttgctcagagacggcgcaacgcacatgctgcgcaggtgtccgaacataccaccaatcaccggccggtgcatgcatatcgctatgggctgacggcgctcaagtgcgaactcgatttcgctgagtagacactcccatgcggtgtccggcgcagcggcgtatgcatcttcggtgagcggatcgagatgaaccatgtctcgtccggtctgccacgcgaacatctccaacgtctcctggcagcgcacccaaggcgacgtggccagtcgggtcggattgaaacacgccagctcgcggttcagcgcgtatgccgcagccgcgccgtgcggcgtgatcggacggttcgcgtccgaacccttccacagcttgcgcgcttccgctttgccgtggcgcacgataatcaccggcacggcgtcaagcgcgccctcctgcacccgatcaacgaatagcgcgaggatgtccttatcggtggaatggctgagcttcttgcgggcctcggccggcgtcagccacaaaacttcgtcgatttcgccgatgtccgcccgatgcaccgggccaaacgcatgggtacgccgcaggttgtcgatggcgctgatcggcgtggccatccagaactggatatgcttggtatccgccgaccgatccttggtatggcgctgtttgctgccttcttcggacagcgggtactcgatgtcgcccagataggggccaagttccacggacaggcccgattcctcgccgatctcgcgtacggcggcatgccggtgcgattcgttcgggtcgaccttgcctttcggccagctccagtcgtcgtatttcgggcgatgcacgatgcacagttcgatgcggttgagtacgttgtccaccgcggccgggctgtcggcctgcgtcgggtccggggtgggagccgcgtccgatgcgccgtgtgctgccgtggtctcgccgtcagaatccgtggtgttcgcgatgatggtgccatcggtggcaatattggatttcgctgatggagacgatgcctgcgtcggctcggcatcatccttccaccggtacagaataccgccggcggcttccacgattcgtctcatactgttcgtacccatctcttgtattgtaggtcacgttggaccgctgctacgtagtttttgcgcgctgaacaacgatgcccggcatcctctcgaaagaggagccgggcatcgtaaccaccctcagtcagctcgtgctgacagggagcatcgaatgaaatcagttgtgcgaattggggcggcgctggtgcttgcgaatcagatattcctgactgtcgaccagcgggcggccctcgtcgtccttggtgtgcagcacatacgtgccgtcgggctgcatgtgccagctcatggtggagtcggccatctgcaggtccacgtacttgatgagcccgtcgacctgctccggggcggtgacacgcaccagagcctccacacggcggtcaaggttacggtgcatgaggtcagccgaaccgatgtagacctccgggccggaagccggaccctcgccgatctgcgggccgtccgcgttgcagaaggcgtagatgcgggagtgctccaggaagcggccgagaatcgaacgcacgcggatgttctcggacaggccgggaacgccgggcttcagagcgcagatgccgcgttcgacgatgtcgatcttcacgccggcctgagaggcacggtacaaggcgtcgatggtcttctcgtccacgatggagttgaccttgatcttgatccaggcctccttgccggcgcgggcggcgtcctcctcgcggcggatgcgctgaatcaggccggtgcgcacggtacgcggggccaccagcagacggtggaagctggacttcggcgcgtaaccagagagctggttgaacagacgagtcagatcctggccgaccaccgggtcgcaggtcagcagacccagatcggtgtacagtcgcgcggtcttcgggttgtagttgccggtgcctacgtggcagtagcggcgcagaccgtccgcttcctgacgcacgacctcgatgagcttgcagtgggtcttcaagcccacgatgccgtacaccacgtgcacgccggcgcgttcgagcttgcgggcccacgcgatgttggcgtcctcgtcgaaacgagccttgatttccaccaaagccagcacctgcttgccggcatgagcggcgtcgatcagggcgtcgatgatcggcgagttggagctggtgcggtacagggtctgcttgatggccagcaccttcgggtccgcggcggcctgcgcaaggaaggcctgcacggaagtggagaaggagtcataggggtgatgcagcaggatgtcgcgctcgcggatggcagcgaaaatatcctgtgcgcgggaggactcgacctcggcgatctgacggttcgtggtcggcacgaacggacggttcttcaggtccgggcggtccacgctgccgagctcaaagagcacggtcaggtccagcgggctgggcagacggtatacctcgtcctggctcacgccgagctggtcggcgagcagctgggagaggaaggggctcgtggtgtccgtgatctccaggcggatcggcggtccgaagcggcggcgcagcagctccttctccatggcgttgagcaggttctcggcgtcatcctcttccacgtcgatgtcctcgttacgagtcacgcggaaggagcgggcctccttgatgatcatgcccgggaacagggattccagatgcgcggcgatgagcttttccatggcgatgaagccgtaacgctcgtccttggactcctcatcggtcatgtcgtccaccggcaccaggcgcggcaggttgcccgggatcttgacgcgggcgaagtgcgacttgccggaggccgggttctccacaatcacggccaggttgatggaaccgccggaaatgtaggggaacgggtgggccggatccacggcgagcggcgtcaggaccgggaacacctgctggcggtagtagcgcgagaggcgctcctgctcggaggatgtgagcttgtcccacgtcagcaggacgatgcgctccttctccaattccggcagaatggtgtcgatcgtgtaatgtgcgtgctcgtcttgcagacggtgtgcggtctcgctgatcgcgcgcagctgctgacgcgggctcaggccggcggcagacggcacggcgatgcccgagtcgatacggcgcttcaggccggcgacgcggaccatgaagaactcgtcaaggttcgaggcgaagatcgcggcgaagttggcgcgctcgagcaggggcatgtcttcgttctccgcacattcgagcacgcgctggttgaacttgagccagctgagctcgcggtcgaagaaacggtccttgggcagcggtgcctcgccttcctgatcgacgcggcggtcgttgttgtcgttttcggcaatatgctctgcgatttggctgcgcagaattgccttcgagggtgcgtcaaatatctgtgccatagcttatatcgtaagctttggcgtggccggaaaacgactgaacgcgccagaattcaacgggtgttcatgttagttcggtgttggttggttttgagtgtgctagcgtcgctcgcgacacgccgtgagcggcggtgaaacgaacgaaatcgaacatcggacgggttcgatgtgaacggttcagctcgttttccgatagccagaaagtgcgattgaacagttgtgataaaaaacgcacaacgactctctgcaggttgcgagaaacgggagtgatgaatagattatgaggtacaagaacaactgaacagagcagagcccacaaatagtgtatggtcacgaggactgttacgttggacgggcattggaaagacttaccgttacaacgatgatgttgtgcagagattctgctccagtagttgaacttgtagaaaaggcccgctccggcgggccttttcgtttgtgtgtacagtggagggcatgacggaaacacagcgtacgccagaggggatgtcgtcgaaacctcgtatcaagccggccgatgccgaagacggccgtccggtctctatctctgcgcgtctcggacgactgcaattccactattccggcaagttccgcgtgctgcagattgccgacattcaggatgggccgaaagtctccaaagacaccatcaccctgattgaggccagccttgatgccacacggcctgatctggtgattttctccggcaaccagatcgccggctacgatccggcgttcgccgattcattccgtaaacgtcgctggtgtgacgaacctattgccgaatccgcgctgaaccatacccgagcgctggtgcgcaaggccattggccagttcactgagccgttggcggcgcgcggcattccgtgggctgtgacgtatggcaaccatgatttccaatgcgggctaagcaatgcggaactggacggtatctatcgcgagttccccggttgtgtcaatccgccgagtgagaccttgccgaaccagattgcatacacctgtggagcgggtggtgctgtgcagacgctgtctggtgccactggttccggtgaaccaggcaccttcgcgctgccggttatggacgttgaccatacgcgcaatgtgctgggtctggtcattcttgactccggcgattacgtgcatggcggcggcttcggcgcaccatcgcccgcagcgctcgccttcctgaacgccgtgcccgaccgtatcggtgcgaaatcaatggtgttccagcacatgccgatgcccgagtattacaacgtgctgaagccggtggcggccaacgcggcgtttgccatgcagggctatcgttcgcacgccgatacctactacgtgctggacgaattgcaaacccagcccggcggatatttgggagaaggcatatcctgccctgatacgtcaggcgaattcgaattgctgcgcgaggggtatttcggcgtcgtagctggtcatgatcatcgcaacggtttcgtcggcgaacatgagggtctgttgcttatcgctacgccaacctgcggattcaatacgtacggaccggctccggccaaacgtgccacgcgattgatcgaatttgatatccgtcacccttacgagccgcgtacgcaattgctggagtttggcgaactggtgggcaagcccagttccaaacgcgcctacacctatgcggtgaaccagaccacgcctggcgagggtgagggcgatgatttgctgcgcaagccgtcgctatggagtcaactgtccggtttattcaggtaactgttcctgatagaggcggaaagcggcgcgaagtattcgaggtttcggtggccttccgctgtgttggacgattagtggcagaaatcccgcgtctctttcgttgtgacgcgggatttctgccggttgggctatcggttggattgactggtatgtttcagcgaacggctttgaccagtgcctcggtgaggtacttgccggcggccatcaccagcggcgcatagcggcgtccgggggcggcacccatgcggccggtcgggccggaaatcgagatggcggcgatgacctggccggaggcgttgcggatcggggcggaaatcgagcacacgccctcttcgcgttcgttcacggactcggaccagccgcgcttgcgtacggcggccagcttggtggcggtgaacttggcgtggcgcaatccctggtgcagacggtcggaatcctcccaagccagaagaatctgggcggcggaaccggcttccatcgacagcatggcacccaccggaatggaatcacgtaggccggaggtgcgttccacagcggcgatgcacacgcgctgatcgccttggcggcggtaaatctgcgcagactcgccagtgcgatcgagcagggtctgcaggatcgggccggcggcggtcagcagacgatcctcgcctgctgcggcggcaagttcggcgaaacgggagccgagtacgaatcggccatgctggtcgcgcagtacgaaacggtggcgttccagtgcaatagccaaacgatgtgcggtcggtcgagcgagaccggtggcggccacaagctggcccagcgtagacgggccggattccagtgcgtcaagaatctttacggttttatcaaggacgccaacgccggaatggatttccccatcgtccttggcggtggtgtcttcaaccggctcggactcggtcaagctgttgttcaatggctcttcttgggaatcagtcataataagggcgattatgccatctcacatagtgaaatagcaaattggggaagtgtctcacagggtggccatgaagttgaaagggcgttcgtggatgccgaagagacatgtctggagcggaaccgagtcatgactaggtcatgttcgagtcgtatccgagtcatattgaggccatcatttgaccgtatctcaatatccggcatgctcatggccgggcccatcgcaagcacataggctaataccacgaacaaggcgcgaacacaatacctcgcgcggaattttttggaggaatcactatgggaacgacactggccgagaaggtctgggccgatcatctggtgcgcaagggcagcgacggagcccctgatttgctgtacatcgatctgatgctcatgcatgaggtcaccagcccgcaggcgtttgagggcctgcgcttggccggccgcaagccgcgtcacgtggatcagctcattgccaccgaggatcacaacacgccgaccgttgatatcgatcgcccgaacccggatgagacgagcgcgttgcagttgacgactttggagaagaactgcaaggagttcggcgtgcgcctgcacccgctgggcgatgccgatcagggcatcgtccacgcgttcgccccgattctgggcctgacccagccgggcatgaccatcgtgtgcggtgattcgcatacgtcgacgcacggcgcgttcggcgcgctggcgttcggcatcggcacttccgaagtcgaacacgtgatggccacacagacgctgtctctgaagccgttcaagaccatggccgtcaacgtcaacggcaagctgcccgcggacgcgacggccaaggacatcattctggcgatcatcgccaagatcggcaccggcggcggccagggttacgtgatcgaataccgtggtgaggcgattcgcaacctcaccatggacgagcgcatgaccgtgtgcaacatgtccatcgaggccggtgcgcgtgccggcatgatcgcgccggacgagaccacgttcgagtacctgaagggccgtccgcacgcgccggaaggcgagctgtgggatcaggccgtggcgtactggaagacgctgaagaccgatgacgatgccgtattcgacaaggtggtggatattgacgccaccaagctcggtccatatgtgacgtggggcaccaaccccggccaaggtctgccgatcaccgcctccgtgccggagccgggcaagatcgccgacgccaccaagcgcgccgccgccgaacgtgcgattacatacatgggtttgaagccaggcatgccgatcaaggacatcgccgtggacaccgtgttcattggttcgtgcaccaacggtcgtatcgacgatttgcgccaggccgccgcgattatgaagggccaccgcaaggccgagaacatccaccgcgtgctggtggtgccggcctcctcccgcgtgcgtttgcaggcggagaaggaaggcctcgataaggtgttcaaggactttggcgccgaatggcgtaacgccggctgctcgatgtgcctgggcatgaacccggacaagctggtgccgaacgagcgctcgatttccacttcgaaccgtaacttcgagggccgccaaggcaagggctcgcgcacgcatctggcgtcgccggccgtagccgccgccaccgccatccgcggcacaatctcgtctcccgccgatctctgagtcaatacacgtgagccccctctgacgaggggctgtcagtcgaagactgactgggggagagatccccgaaaggaaaattgttatggaaaaactcaccacactgaccggcgtgggcgtgccgctgcgccgctccaacgtcgataccgaccagatcattcccgctgtgttcttgaagcgcgtgaccaagtccggcttcgatgacgccctgttctacgcatggcgccgagacccgaacttcgtgctcaacaagccggaatacgccggtaagggccagattctggtcgccggccccgaattcggcatcggctcctcccgcgagcacgccgtgtgggcgctgcacgattacggtttccgcgtggtcatcgcgccgagcttcgccgacatcttctacggcaacaccgccaagaacggcgtgctggccgcgattatgccgcaggagtccgtcgaactcctgtggaagctactggaggaagagcctggtcgtgagatgactgtctcgctggagacccgcactgtcacttgcggcgacgtgaccctgccgttcgaggtcaacgattacgtgcgttggcgtctgatgaacggctacgacgatatcgatctgacgctgcagcacgaggacgacatcgccgcctacgaaaagatgcgcgccgaaaagttccccttcaagcccaagaccatccccgccaaacactgggccgaagaaagaatcgagtccgcccgcgagcctgaggacgcagactggacagggccgttggccgatcgcggcattatttagccgcgatcggcctgctgaaagcccggtgggctttcagcaggccctgtgccgagctgcgacagcagcgaggccagcattgagcctcgccgaaaggcgagtccataattgcaggcccagggccgttggctctgtgtctgattgagattattgggtcgctcgcatcgcatcaaacaaaggtctcactggtgcccgcgccccacatccattgcgcggcgggcaggagttgcggcaatattcccttcagtgccaacaacgccatacggtcgttatccaccgcagccaccaacaccggcgtggcggcgctttcctcaacactcatgaactccgtcctagcgttcgaaatactgtgcctgaatccgtacacatttgtggacataatcacgattcatccagtaatgacggttaggttgagcatcatgaccatgaatggcatgaatccgtcgaacgattccgatacggctccggcgcaatcgctgtcagcgcaaccgttgccacctcgaccggcaccgcagtctgcggcacagtcacagacgccgatgccacagacgccacagtatgttcagcctgggccgagtatgcagccgcaatatgcgggtcagccggaggcatgggcacaaccgctacctccacaagatgtttcacggggtgttccacggattgtttcacaaggtgtttcacaacctgtgccgcaagccgcaatacctgctgtgcagcctgcacaatacgccgcgcagctcgtatacccgacatatcccgtccaacctacgtatcctgcccagccgatgtatcccacgcagccgacgtatccggcgcaatccgcctattccccatacccggcgcaacagtcggctccacagcccctcgctcatccgtactacgctcaaccagtgggctacgcgccacaaccctattccgctgcgccgcaaccattcgtgcaaacggctccggcaatgccagtcacaatgcccaacgcaatgcctgccacgatgcccgcagcaatgcccgtggtcatgccgatcgatcctcgccgtgtatggcgcacgtggcgtcgcaaggtggtcaatcgtgtaatgggactgactctcgcctatgaaggcatgatgctcttgggcgcaatggtcgccaccattatcgtcggcgtaataaccgcgagcgatttgtccggcgtgcagtgggatggcatcatcagcctgatatcggtgttcgtcgcgttcggatttctgctgctcatgcgccaccgtgacatcttcacctgcgaattctggcttggtggccagcatcgcgactcgtacggggagcccaatcagcttggccacatcagccaatatggcggcgggcgcatgcagcctctctgggcgttgatgttcatcgtgctgggcatgggcgtgcaaggcatcgttatgttggtgcaggtcgctttttccaggctgggcaccgatcttgcctctcccacgtcagacagcatcgccgaatccagcgtcaccgtaagcatgtggctgtacgttgggctggtcgctccgatttgcgaggaagtactgttccgcggcgtactgatgaaggagctcaagccgttgggcaagaacttcgccatcgtcacctcggcaatggtgttcggcctgttccatgacgacgtagtgcaaggcacattcgcgttcctctttggcctgattctgggattcgtggccatggaatactcgttggtttggtcgattgcactgcacatcttcaacaatgcgattctttccggcgccatcgatacccttgccggcaactatcttgatgacaacgcatatttgatattctcattgtcgctatctgtgatcggcgtgatcggatcgattatcatattcgtgatatacggcaaagagatgcgccaatatcaccgtacgaatcgtagtattccagacacgtactttggctgggcagctccgacgttcatcatctttgtggtagccaatgccgctttcgccattatttcgtttgtcggcgcgatgatgggttgagtgtgcgtgtgcgcatgcaggttggcttatcgttgaagcatgagtgattttgagccgttttacgatgtcagccgcagctacgaagacaactatgagcaagggccgttcggcgcgtttgccgaggcgctgaaggatggcaacggtgccgatgccgccggaaccaccagcgagggtgcctcggcctccttcctgggccagccggtcaacctgcctttcggcattcccgcaggcccgctgctcaacagccgcttcaccacggccgccttccgcatgggcttcgatctggcgacctacaaaaccgtgcgttcgcgcgcctggggctgcaacccgttcccgaacgtgctcgccgtacaccccaaggcggcggacggttcactgacgccgggcagcgccgaactggacgagggcgtgctcgccgacaccaattacgagactccgatctccatctccaatagtttcggcgtgccctcgcaaagcccggatgcctggcagccggacatgcgcgccgccatcgaggccgccggccccggtcaagtgctggtcccgagcttccaaggctcgcgtgtggagggcatgagcgaggaggaatacatcgccgaccatgccaccaccgcccgcctggtcaaagaaaccggtgccaagctcatggtgatgaacaccagctgccccaacgagggccacaaccgcctgctatgccacaatccgctgctcgtgggccgcatcaccgaggccgtgaagcaggagatcggcgacatcccgctgatggtcaagctcgcctacatccccagcgacggcgaccttgaactcatggtgcgttccaccgtgggccacggcactgtgcagggattcagcaccatcaatacgatttccgccaaactggtcgatgccaatggcaatcaggccctgcccggcgcgggccgcgatcactcaggcgtgtgcggcaatgcgattcgtggcgccggtctcgacatggtcgcccgtctggccgcgattcgtgaaaagctcgggctcgatttcgcgatcaacggcgtcggcggcgtggtctcgcccgccgactaccaggcgtaccgtgacgccggcgcggactcggtgatgtccgccaccggcgcgatgtgggacgccgaactggcccacaagatcaaggccagccggtaaatcggctccaaaaacaagcaacagcctgtacgggccgtgattcccagacgattcccagacagtgcccatgttgcattgaaactgttgctgttatatgtaatcacggccgaacaagctgcataacttaacctctttcttcttctctcctttctctccccggcgcccatcacgccggggtttcttttttgcggtgggtacagccgtcttactcggccgccgccttcatggccacggcgccgacgtagtagaccggcttgtcgaagttcggctggaacaggaagtccacgttggcgagctggtcgatggtgaagccggcctgaatcgccatggaaatcacgtttgccgcgccggagatatcggccttggaacagaactggccgcccttgaccttgcgggtttccgggtcccaggtcagaatcgacgtgactggggtggtggtgagcatgaagtccgggcgataatcctcggtgagcgaggtctcgcggaccgtgagcccgcggcgttcggcaccggcgcgggtcaggccggaggcggcgagcgagagatcgtacagctgcacggcggacgtggcctgcgtgcccatgtacttcacggtcggcgtctcgatgttgcggcccaccagcaggccctggcgcaccgcgttggtggccagcggaatgtaatcgtgctggccggtggggttgtagaacacggtggcggagtcgccggcggcgtacacgcccggcgcggacgcctgcatgtagtcgtcgaccacgatcgcgccgttcggcagcatgtccaccttgcccttgagcaggtcggtgttcggcaggaagccgacggccagaatcgccatttcggccgtgtactcgcccttttcggtgaccacagtgacggtgtcgtcgtcattgtcgcggaactcgaccaccttctggccgagcgcgagcgtgacgccgtgctcctcgaacgcggccgccacctgatcggtgatggtcttatcgaaattattggccagcgggcgatcaaggccgtcgaccagcgtggtcttgacgccggtgacgctgaactgctcggcgatttccgcgccgatatagcccgacccgatcaccactgccgacttggcggttttcgccttttccttgatggcgatggcgtgatcccagttcttgcacagcagtacatgcgggctgtcgatgccggggatcggcgggatgaccgggcgcgagccggtggtcacgaccagtttgtcgaaagcgagggtctgttcggcggggtctccggcctcgtccagcgcgcggtaggtgagggttctggcgtcgaggtccacggacgtcacgtcggtgcgcatatgcatggtcgcgccggcttcggccagagcggcaggggaggagtagaacattttcttcgggtcggatacgtggccgcccacccacagggcgatgccgcaggagaggaaggacagcgtaccgttgcgctcgaaaacatggacggtccaatcggggtgctcggcgagaatcgaggtggtggcgaacgtgccggcgtgcgtgcagccgatgacggcgactgtggtcatgaatgctcctttgcttgtggacatggcgtctgatgccattgccctgaatcgtagcgtagaagtatggagaacgccgtggcggcaaatgtgaggaagatcacgttatcggtttgattcgacgggggtatgggatccgttgtgcacggtgatcaaagttcggctggggtgcatttcacggagtcggcacatggcttatggcaaactggacggtagcattttttgaatcttgattgattgaggagagtggcgtggctgagaatccggatgacgtgttgcatgtcgagggcggcaagcctttgaatggcacgatcaaggtgcgtggcgcgaagaacttcgtgagcaaggcgatggtcgccgcgttgctggcaccgggcaagtcggtgctgaagaacgtgccggagattcgtgacgtgcatgtggtgtccgatttgctacgtctgcacggcgtggacgtggatgtggacggtgcgaacggcattgtgaccatcgacgcctcgcgtgtgcagctggccgatgtggccgacgtggatacactgtccggttcgtcgcgcatcccgatcctgttttccggcccgctcgtgcaccgtttgggtgaagcgttcattcccgcgttgggcggctgcgcgattggcggacgtccgattgacttccatctggagacgctgcgcaagctgggcgccacggtggacaaggaacacaaggacggcatccacatcaccgcgcccaacggcctgcacggcgcgaagatccacctgccctacccgtcggtgggcgccaccgagcagactttactggcggccgtgctggccgagggcaagaccgaactgtcgggcgcggccactgagccggagatcatggatctggtgtgcgtgctgcagaagatgggtgcaatcatttctgtggacgttgatcgcaccttccgcatcgagggtgtcaaggaactgcaggggtacacgcacacgtcgctgacggatcgcatcgaggcggcgtcctgggcgtccgccgcgctcgccacgcacggtgacattttcgtcaagggtgccacccagccggagatgatcacgttcctcaacgtgttccgcaaggtgggcggcaaattcgaggtgacggacaagggcattcgtttctggcatccgggcggggacttgaagcccgtggcgatcgagacggacgtgcatcccgggttcatgaccgactggcagcagccgctcgtggtggccctgacccaggccaacggcctgtcgatcgtgcacgagaccgtgtacgagaaccgtttcggcttcaccaagccgctggtcgagatgggtgccaccatccagttgtaccgcgagtgcctgggctcgctgccgtgccgtttccggcagcgcaactacaagcattccgccgtgatcttcggaccgaccccgctgaccggacgcgacatcgacgtgccggacctgcgtggtgggttcagccatctgatcgcggccttggccgcgtcaggcccctcggacgtgcacggcatcagcctgatcgaccgaggctacgccgacttccgcggcaagctcgaagccctcggtgccgacttcgactaattcggccgttcctcggctcccctctttgaggggagccgcaattctgttctacaacaacccgtccgcctcaagtgcggcggccatgcggtcgaagcattcctccagtagcgggtagggcatggcgaagttcatacgcacgcaaccgcgcccgacctcgccgcattcacggccgtctgtcaacgccacgttggccttcttaaagaaatagttggccgggtcgccgatgcccagtggcgagaaatccagccacgcgatatacgtgccctgcggctccacatagcgcaccttggcgaatctcgtgcgcatctgctcgttgaccagcgcgatattgcgctcgatatatgccatcacgccctcgaaccatgccgcgccgccgtcataggccgcagtggtggctatggcaccgatggtggccgtctggtgctcggaccattccgcgttcctcatccatagttccagatcgtccggattggtgagaatcacctgcgcgcacttggtgccgggaatgttgaacgacttcgaggctgaagtggaggtgaaagcctgcatggccgtctgccggttgattgaggcgaatggcacatgcgtgtggccttggtagacgaacggcgcgtgaatctcatcggagaatatacgcacgtcgtacttggcggccagatcggacaatcgcagcatttcttcgcgcgtcaataccttgccgatcgggttgtgcgggttgcacagcacgaaggcatggcagccgttcgcgaacgcctgctcaatggcgtcgaaatcgaacagccattcatcattgcgcccgctgctctcgccggcgcccgcgcacagcatcggaatctcaaggacctccacgccatacagacgcggcacacttaggaacggcatataggccggagtcggtaccacgatggagttaccggcgcgcacgatctcgcgcaggaacacttcgaacgcctccagcacgtccggcaccgggcggatgcacgttggatccacctcccagccgtagcggcgctgccatgcggcgcacgagcgggcgacctccttcttccacgggtcgggaatgtagccgagcgcgccacgttcagtagcctcttcgatggcttcggccacgcacggtgccagaccgtaatccatctcggcgatgaatgcgccgatgcagccggggtaacgggtccatttatccgaaccgacctgctccagatcctcgatggtcgtcacgtcgatgtgattggcatcaaagcaagaggtgccggcggttgtgttgctcaaagtcgttgactggggaatgttgttcatgctcataacatgtcattgttcccggtgcagaagggctgctcaacggtctggctccccgaaatcgtgatggcgctcgcaagcttgcttatcgctgtgcgactacttggcactcaaatatttgagtgacgtgcgctcgagctcctcgagcaatgaaccaagcgcggggcgatggtcgccggcacgagtcacgatgccgacctcgcgcgccgcaaaatcgtcggcaatgggacaggccaccagatcgccctgcaagttgatatgcgtatcgagcgccggcaccagcgagacgcccataccaacctcgaccaggttctgcgtggcccagtaatcatccgtgcagtggcggatatccggcttgaatccggcacgggtggccagtttcaccaaatttgcgcggcaggtggggcagccggcgatccaatgctcgtctttggcggcggacagcggcacaggttcgccggtctcctcgaatcgtttggcgatgccgctggagcggcgcaccagcagtcgcatcggatcgtaacccagcgaatggaaggtcaggtcgtcgccgatgtgcaggaagttcgggatgctgctgtagcggaacacggcggcggtatcggccttgccttgggaaatcagaccgatcgcctccggcggctccatctgaatcaggctcagctcgatgtccgtgaacatactgagcttgaccacggtacgggccgcgatagtagagcagattgacggtggggccaccaaatgcaggtgatcaaaccgatgatgccgataatcctcgacttcacgggccgcccgctccagccgatcggcgatggcctcgccgtggcgggcgagcatcgaaccggtggcggtgagttccacgccatgcgaggtgcgttgcaccagagtcgaaccgcactgtgcctccagctttttgatctgctggctgatggccggctgcgaccaacccgtggccttggccgtggcggagaacgaaccatactgttcgatttgccacaacgtgaccaatgattgggggttgagcgtggccataggtacctctttcgtgccttttcgtgccttttcgtgcggtgattcaattatggccgggcggcaggatgtggcgtgcgcgccgatcgtcagtcctcgaactgcttggcgagcggaaccatcagcacggtgagcacggcgaacagggcggtggtgatgaacagcacgatggcgaccggcatttggtcgtaggcccagccgtacaccatctggccgagcggctgggcacacatgctcacggccgcggccatggacatcactttgccggccattgcctcgggcgtactgagctggatggcgggcacggcgatgagattcgtgaagcaactggcgaccatcgtgccgcaggtgaatacgatcagcaccacgagtttggtccatgcgtcgaccggcagcaggaacacaataccctgtgggaccatggccagcgtaagcgtcgccatcagccccggcagccagcgcatcgtgagcttggcggcgaacaggccggcgatgaatgcgcccgccacgccggaaacaccgatcaggccgtcggcgatgccgtagacagtggcgtcgaagccgagcactgtacgaatcgtgtacgggaagccgacgccggaatagccgataagcacaaagttgagcgccgccgcgaacaacagcagtctgaacacgttcggccggtccttgatgaggaatcgcacgcctgccttgaggtcttcaagtggggtgggcagctcctcgtcgccgcgatccggggcactgaggcggatgaagcattcgagcgcggctgcgccggcgaagcttgcgatggcgatgatcatcatgagacggatgccgaacatcgcatacagcacgccgccgaggaagctcggcagcagactgcttagttgttggacctgattgatcacggccatgccttggcgcatggtggccgggccgtactgccggaacatctgggggagtgcggcttgcacggtcggggtttcgaaggcgccgagcacggcgagcagcacctgcatggtggcgatggctacgatatggaagcccgtggtggcgaagacgatggcgctcgccagcacgagcacggcggagatggcgtcgagcgccaccatgatggtgcggcggttgacgcgatcggccagcacgcctccgaacggggagagcaggatggtcggcacgatggagatggccagcaccgaggcgaagatggtggctgagccggtttcgtccagcacccacatcgacatcgcgaatcgcagcatcacattgccgaacagcgagatgccttgtccggcgaccagcagcacgaagtcgcgggacagcagcgggcgttgggtggcggtgccggcgatgtcattctcgggtttcactgtgctattcattctgagcctttctccggctcccctgcgaacgtcatcatgcccttcgcggcgaccgtgatgagctcgtcatcgaaaatcggcacgccgatcgcgtcgagcatggtggccaagcagcggatgcgatgctccatttcgggcagggtcaccgggtagaaatacggcatcagccaataattcggcagcaacgaaagcagctctgcggcctcgcgcggatactcggtggggatggagccatccttgacgcccgcctcgatcagcggcaggaagcgttcgggcagatgcttgctccatacctgcatattcgcggcgaacgaaaccggatcgctcagcatcggcatggcggctcgcatgatctgcacgtggtcttgcttggtcatcgaatgccgccatagcacgcggaacttttcgagggcggtaaggtcagtgcgattcatgacggattcgttgaagtcgtcctgcatattgttgtctcggttggtgagctcttcgaggatggcttccttggatttgaagtgatggtagatcgcgcctttggagaggtcgccgagctcgtccacgatgtcctggatggaggtgtgctcatagccctgggccatgaacagccgttgtgcggcgtcgaggatgcgggtgcgcgtcacctcggggtgagcgttacgtgccatggtggcctccctactgtgcttgatgttgcagatcactatagataccgaccgacggtatgtatagcggtttcggcgagcctccaacgattccggcgattgtcgcctaccctttttcgcttggtatctttcggctgtgtgcttgcccccgccagcaggggcagcatataggcataccagggcgcaagtgtcgccgttctcagtatccttagaagaatgagtcctgaagccttaagtgaactgatttccagcattgcccacaacctcgtcgccgccggccaggccggcgcgttgaccgacgagctgattccgcccgtcgacaagctcgccgtgatgcgcccgaaggaccgtgcgcatggcgactgggcctccaacatcgccatgcagctggccaagaaggccggcatgaagccgcgcgatctggccgagccgttcgccgccgcgctcgctgaagccgacggcatcgccaaggtcgaggtggcaggccccggcttcatcaacatcacgcttgactccgcctcggccgccgccgtggtggacgccgtactcgccgccggtgccgtgaccgacgccgacaagcatctcaacaaggtcaacgaatacggccgcaacgaccatctgggcggccagaccctgaatctcgagttcgtctccgccaaccccaccggtccgattcacatcggcggcacccgttgggctgccgtcggcgatgccatggcccgcgtgctcgaggccaacggcgccaaggtggtgcgcgaatactacttcaacgaccacggcgagcagatcaaccgcttcgccaagtcgctggtcgccgcttgggccgaggccaataacttgggtgaggccggctaccagaccgaaaccccgtgcgacggctacaagggtgcctacatcaacgagatcgccgcccgtgttcaggccgaagccgagtccgacggcgtggacctgaccgcactggcccaccaggatcagggcctgaacgatgacggtgaaccgctcggcgaggccgataccgaagtgcgcgaggaattccgcaagcgcgccgtaccgatgatgttcgacgagattcagaagtccatgaaggacttccgcgtgaacttcgacgtctggttccatgaaaacagcctgtacgccgacggcaaggtcgacgccgccatcgaagagctcaagtcccgcggcgacatcttcgacaaggacggcgccacttggtttgaatccaccaagcacggcgacgacaaggaccgtgtgatcatcaagtccaatggtgagttcgcctacttcgccgccgacatcgcctactactgggacaagcgccatcgcgccgaaaactcggccgacgtggccatctacatgcttggcgcggaccaccacggctacatcggccgcatgatggccatgtgcgcggccttcggcgatgagcccggcaagaacatgcagattctcatcggccagctggtcaacgtgatgaaggacggcaagcccgtgcgcatgtccaagcgcgccggcaacgtcgtgaccatcgacgacctggtctccgtggtcggcgtggacgccgcccgctactcgctggcccgctccgattacaaccagaacttcgacatcgacttggccctgctcgcctcgcacaccaacgacaacccggtgtactacgtgcagtacgcgcacgcccgctccaagaacgtggaccgcaacgcagccgccgccggcatcagctacgagggtgccgacctggccctgctcgacaccgaggccgacggcgaagtgctcgccgccctcgcccaattcccgagcgtgctcgccactgcggccgacgaccgccagccgcacaaggtggcccgttacctcgaagaactggccgccacctatcacaagtggtacaacgtagagcgcgtggtgccgatggccctgaccgatccggaaacccgtggcgacgacgaggctcgcaaggccttggagattgccaagaacccggagccggcccgtgccgccgcccgcctgaagctcaatgacgccgtccagcaggtcatcgccaacggcctcgacctcctcggcgtcaccgcccccgaaaagatgtgattatgcctatttctccaatttggccggccgctacggctgtgaatgccgaaggctccatcgaatttcatggtcgtaccgccgaatcgctgcttgacgagttcggctcgccgctctatctcatcgacactgatgaagtagtcgcacgtgctaggcacttcgtgcgcgctgccgccgaagcattcaacacctccactacgcacgtgagctttgccggcaaggcgttcttgtccaaagaagtcgtgcgattggtcaccgaggccggcatgtttgtggacacttgcacgatgggcgagatgaaaatcgccctcgccgctggcgttcccggacgtcgtctggtgctgcacggcaacaacaagtccgatgaggaaatcgcgctggccatcgaacagggcttcgccaaaatcgtgatcgacgagcccgacgagccggagcgcgttgctgccatcgcccgcaagctcggcaaacgcgcccgtgtgatgctgcgcgtcaccgtcggtgtccacgccggcggccacgagtacatctccactgctcacgaggaccagaagttcggcgtgccgctgctggccgccggggccgacgccgccgtgctcgacgtgctgaacgacctcaaagacgtgacgcctgccgctaccaacgcgcgtatctctgcgacgcattccccggaaaatggcgcggaaaagaccgagaaatcagagcgcgagctgcactacgacgtcaagtacccgtacgacctgagccacgaggaagtctccgacacagacaaggcgctggccgccgcgatggaagccattgcggacggtccgtccatcgccgtgctcaagaccatcctcgccaaccaggacgtactcgaactggtcggagcccactcgcacatcggctccaacatccacgatgcggacgccttcattcacgcggccaagcgcatgatgctgctgcgcaagaccctgtgggccaccgacgcctacatcctgcccgaaatcgacctcggcggcggctactccgtggcctacaccgatggcgaagattcaatggacattgacgtggaactcactcgcttggcggatgcggtcaacagcaccaaccgtgcgctcggcatgcccgccccggccatcagcttcgagcccggccgctacatcgtggcgcccgccggcgtaaccctgtaccgcgtgggcaccatcaagcacgtgcacttgtccgatgccaaagacagtgacggcaacccgattgccgagcgcgtgtatgtgtctgtggatggcggcatgtccgacaacattcgcccggcactctacggtgccgactacaccgcgcgtctggcgaatcgcaccggttccgctgaaacgatgcttgcccgtgtgtgcggtatgcactgcgaatccggcgacatcgtggttcacgaggtgcagttgcccgccgatttgaagcgcggtgacattctcgccgtgccggttaccggcgcatacggccgcaccatggccagcaactacaaccaagcgctgattccggcggtggttgctgtcagcgagtccggtgcgcacgtcatgctccgccgccagaccgtagacgacctactcaacctcgacgtcagcgagtgatccacgtgcagaggcgagcgcctgacagtctgtaatgtgcggccaaatccgtcataatacgaaaaggaccgtcagctttgatgagtactttcggtctgctgtcggaaataatccgtaaaatagcggtgggatatagaaaactttttggaaggaccctgaattggctcgcaacaacgaaaccccgattcgcgtaggcctgcttggtgccggcaccgtcggctcccagaccgcccgcctgattgtcgagcagaaggacgaactgtccgctcgtatcggccgcccgatcgaactgaccggcgtcgcctgcctcgacccgaaggaaaccgagaagttcccgtggatcgaccagtccatcgtcaccaccgatactttgagcgtggccaccaactcggacatcgtcatcgagctcatcggcggcaccaccgtggcccgcaagttcgtgcttgccgccatcgaatccggtgcttccgtggtcaccgccaacaaggcgctgctggccaagtacggcccggagatctactccgccgccgaggccaagggcgtcgacatctacttcgaggccgctgtgggtggcgcgattccgttcctgcgcccgctgcgcgagtccttggtcggcgacaaggtgaccagcatgctcggcatcgtcaacggcaccaccaactacatcctcgacgagatgaccaccaagggtctccagtttgacgacgtgctcaaggacgcccaggccaagggctacgccgaagccgacccgaccggcgacatcgaaggctacgatgctgccaacaaggccgccatcatggccaccctcggcttccacacctccgtgaccatcgacgatgtgtccgttgagggcatcaccaagatcaccgccgacgacatcgccgcagccaccgccgaacacaaggtcatcaagctgctcgccgtggtcgagaacggcgaggccggcgtctccgcccgcgtctacccggccctgatcgacgagaaccacccgctggcctccgtgcacggctccttcaacgccgtgttcgtcaaggccgaggccgccgacgacctcatgttctacggccgtggcgccggcggcgctccgaccgcctccgccgtcgtgggcgacgtggtgaccgaagcccgccacattgctgctggctgcaccggcccgtccatcccgctgtacaagaatctgccgaaggctccgattaccgcctccaaggctgcattcgccgtgcgcttcctgattcacgacaagccgggcgtgctggccgccatcgccgctgagttcgccaagaacggtgtctccatcaacggtgtgaaccaggacctgaagcccaccatgaccgatcccggctacgacggcgagattcagcagttgcgcgtcgtgacccacctgaccgacgaggaaaccctgcgcaacaccgtcaaggccgtgcaggcgctcgacttcgtcaccggcgacccgtccatcctgcgcgtgctggactgacaccgtctaggctccctctgatgaggcggtcgaacggctgcctgtgagttgaaagctgaatacccaagctcccctgacaaggggagctcctttttaaggaacaaccatgaatccaatctgcaatagcgttcacgtgcgcgtgcccgccacgtccgccaacctcggctccggcttcgataccgtgggtctggcgctcgactaccatgacgagctcactttcacgctcaacgacgacccgaacgacggcattgcccacgtgatcatccacggcgagggtgccgacgccctcccatgcgacgaaacccacctcgtggtctccaccttccgccgtgcctgtgccacgttcggcctcggccgactcggcttcacgctggaagcgaccaacaacatccctcaggctcgtggcatgggctcttccgccgaggccattgtggccggcatcgccgccgccgcggccttcgcccagaccggtgacctcaaccgtccggccgtcttcgatatggccgcccagattgaaggacacccggacaatgtggccccggctgtgttcggtggcctgaccgtctcttgggacttcgaaaccgcagaaggcgtcggctcggtcgccgttcctggtggtgaaccgctgcacggcggattccacgccgtcaactacccggtggacccgtccatcaccgccgccgtgttcgtgcccgactatgagctgtccactgagaaggcccgtcaggcgctgcctagggaactgccatacaaggacgccgtctacaacgtgtctcgcgtgggtctgctgcccgctgcgatgaatcccatggtgctggcccaggccgcccagcagggcaagtccggcgtcgccgctgccccggctcaggatgccgatacgtgcgcttgcgctggcggaacccgtgaatcgccgttcgctgacgagcttgcggccgctcaggcccagtccaacgcgctactgttcaccgccacgcaggacaagttgcaccagccgtatcgcggtaccctgatgccgccgtccaccgagctcattgcgctcttccgctccaagggctatgccgccgccgtctccggtgctggcccctgcgtgctcgtgctgcactacggcaacgcccgcgaagccatcgaccagatcgcatcggagcagcttgcttccggccactggcgtgtgcttcacctgcccatcaacaccgccggcgtcgaaatcgagcgtcgctaagtcgaggagaaggctcccgctggcgggagctggccgccgcaggcggtctgagagtggtccgccataccggcagagaccaccctcagtctcacttcgttcgacagctcccgccagcgggagcataaggacttaagtcatgtccattccgctaattcttgcttccaagtccaagcctcgccgtgacgtgctgtattcggcgggtatctgccccacaattcgcgtctcgcacgtggatgagcctgctgcgctggaagcggccgcccgtgaggaaggtgtcaccgtcgacgatttgagcatcaagcagcgtgtgatgattcttgccgtagccaaggccgaggccgttcaccgtgcgtatcgcgatgtggccgatactgccgccgctgcgaccggtgaccgcgtgatcgcctacccgctcaaggccaaggaaatcaaggattcggaacgcgaagctgccgtcgaagacttgcgtgaagccgccgctggcaagcccattgactattccaaggcggaaatcgccaccacgcgcgacttctccggcatcgatatgccgaccgtcaccgaacccatcgccaccgctattgccggacagccgggactgaccgaggcgacagtcggcccgctgattctcggctgtgattcgatgttcctcttgggcggcgaatgctacggcaagccgcacagcgaagccgtggccagcgaacgactgaagcgcatgagcggcgcgaccggcgaactgtggaccggccactgcctgatcgatttcgcgaccgggcgtaccgtgcgcggcgcaagccacgccaaagtccatttcggcgaattcaccgatgccgacgtcgaacggtacattgccactggcgagccgctggaagtcgccggatcgttcacgctggaaggcttcggtggtgcgttcatcgacagtattgagggcgatccgcacggcatcatcggcctcagcttgccgctggcccggcatctggccggcgaactgggcatcacgtggactgacctgtggaatgtcggccgtggtgaactggaaccggaaagcaaggcatcgggcaaccagcacgctggcattctgccgccggtcgaaaacgtacaccagcccggcgatggctgggtggactgcgcctgcggccgcaagcattggggcaccaacggtgcttccggtattctgctggctcgtcgcgacccggtgagtggcaaggtgacccacgtggtcatgcaacatcgcgccgcgtggagcgccgaaggcggcacgtggggtattcccggcggtgccaccgcggacggcgaatcgcccatcgagggcgcgctgcgcgaaagctatgaggaagccaacatcactcccgaagacatcgaggtagtcggctcctaccgcgaggaccacggcccgtgggcctacaccaccgtgtttgccttcgaaaagcccggccacaccgtcgagcccaaggcaaacgacgacgaaagcatggaaatctgctgggtcccgattgacgacgtgcccaaccgcaagctcctcaccgctatgaagaccgactggccccgcttcgccgcccgcctggacgagttggctaccgcgcaataatgcgcgtagcgcctgaatgcaatgctcataatgaccggcaccgaatagtggttgccggtcattaatcatttgcgtatctctaatccttgcggatgaggagcgggccggtgatccagaaaggttcataccgcagcccgatggtcggctgggcgttcgctccgtacgctcgggagtatgaatacagcagcatcgcaattgcagcagcctcagccggcgccgggaccggcggctcagcctcagcagtctcagcaaccccaacagttccagcagccggcatcgcacacccagcagtgggccccggtcatcgaggcccatgacctggtcatggactacaccgccagcatggcccgcgcacaggccgggcacggcgtcaccggcgtgataccagccggcacgggagccggttatgcgtcggcgaatcccgctgcggccggaccgggtgccattcaggccggccagccatcccagccagcccagcccggcttcgccatgccgaccatgcacacgctcgccctgaaccacgtgaacttcacgctccgggagggcgagacggtagccgtgatgggcccgtccggctccggcaaatccactttgctgcacgcgctcgccggcatcattaagccgaccgccggcaccgtcatcttccgtggtgccgacctgagccgcatgagcgacgccgagcgcaccaaactgcgccgcaacgacttcggcttcgtcttccagtccggccagctgctgcccgaactgccggcggtcgaaaacatcgccctgccgatgatgcttgacggcatgccctaccgcaccgccaccgacacggcgatcctgtggctggaacgcatgggattgcgcgcgctcgccacgcaccggccgggggagatgagcggcggacagatgcagcgcatcgccatcgcccgtgcactcgccgtcaaacctgccgtggtcttcgccgacgagccgaccggcgcgctcgaccaagccaccggccgcgaggtcatgggcattctcatggccgccgcgcgggacaacggttccgccgtggtcgtcgtcacccacgaccccaacgtcgcttcgttctgcggccgtaccgtaatgatgcaggacggccgtctgcaccagacagacgccaaccccaactccgcccccgctggcgggggctgtcagccgcaggctgactgggggtggcccgagggcgctgaaccaccctcagcctcgctacgctcggcagctccagccggcgggagcgaaaccaccgcaggaggcgcgcgatgagcacgttcgccctctggcggctgtttcaccgccccggcttgcgcggcagcgccggccacacctcgatgctggcaatcatcgccttcgccgcagccaccaccatcttcctcaccgtgctcggcggcgtacacggtttcatctggcgggcttcggccgatcataccgtcgcctgcgcgttcgacttcggtgcctgccggcccgatacggtggccgcgtggaaacggcagatcagcgacccgacgagcctggcccaattctccaccgcctatgtggcgttggcggtattcgcctgcatgctgctcgtcgtgccgttcgtggcgctcgccggttccgccgcacgactggccgcatcccgccgcgacgcccgtctcgccgccctgcgtctggccggcgcgaccaccggtcaggtggtgcgtctcaccgcgcttgacgccgccggacaggcgctgatcggcgcgcttatcggcattgccggctattgcgccctgatgccggcagtcatgctgattcccttccaggagcagcggttcaccttcgaacagctatgggtcggcccgctggcgctggtaatcaccttggcgggcgtggccatcttggcgctgatatcgtcgctggtcaccttgcgccgcgtggcaatcaccccattgggtgtcacctcgcgcaccgccaccgcattgccctcaggcacccgtatggtgctgttcgtggtagtcgtggtggtggccatgatcgtcttcaagaacccggccatgctggctcaggccggccaggcggtgatgtacggcgtgatcatcggtttcatgctgctgtgcttcgcgctggtgaatcttatcggcacgtgggtgatcaccgctcgcgccaaggccaaggccaagcgccccagggatgcggccacgatgattgccatgcgccgtattctcgacaaccctaagcgcgcctggcgcaatgtgtccggcattgcgttggccgtgtttatcgccggcatcacgtcgatctgcggattcttcggatcggccgccgtggtcgatgacgccaacgacccgttcaccgtgttcattcgcgacatcggcaccggcggcattctgacgctcgtgttcgccgctgtgcttgccgcggtcagctccggtgtgatgcaggccggcagcgtgtacgatcaggccggcgaatatcgcatgctggtgttggagggcactgatgtcaagaccttgaaccgtgcgcgattcatcgaggtactcaccccgctcaacatcgtggtgatcgtggccggcggctgttccatgctgcttatggcccctctgttcgccgcttcgatgaccgaaccggccacgctggccagcttcttcggcgggcttgtgttgtgctatgcgctggtttccatcggcgcgttcgcgtccaatcatgtggcggccagcttgaatctgaccgattatcgggctgatgactgagccgagctgcgcagcgaatcgttctcaataacaactgtgcgtactttcgtatacgcaaatcgaacgtagaaacgctgaaatcaccgcaaatatgcggatgagcaaatgttcgtttgtgcgatatctgtgcatttgcgcgcacggatactattgagaacgcttctctgcgcacccatcacgacagcagcgccgcgatgatcgcgataaacaccgggctggtcatggtgctcatcagaatgccgtcgcgcgcgaaggtgagacccacgttgtagcgggccgcgtagttgtatacgttctggccggtgggcagagcggcgagtaccacgcaggcgtacagctcggagccgcggaagcccatcacgaagtaggcgagcaggaacgcgataattggcatgatgatgttcttgaggaccgcgaccgtgaagatggccgggcgatcgcccttctgctgtagcggcttggtgccgtgcagggacatgccgaacgccatcaggatcattggcacagccgaatcgccgatcatgtcgatcgggtcgaaaatgaatttcggcactgggaaccagccgcttttagcggaaatcgcagagaccacaatgcccagcagcgagccgataagcagcggctgatgcagtggctgcttggcgatttccttgatggagaccttgcccttggtggtcacgtccagcactgtcaggcccaccggtgtgaagatggcctgctgcatgaccagaatcggtgccacaagagccggattgcccagaatgtaggtggcgattggcaggccgatgttattggaattgaggtacagcgaattcagggcaccgatggtggcgtccggggcattcaggtggaagaacatacggttgagcaccaaaaacaccacgcctaccagcacggcggagaagaacgccacgataatcgaggggtggaagatgtcgaaaatcggctccttggagagaatcgcgaacatcaggcacgggctcgatacgaagaaggagaaccggttgagcaccatctgagcggacggcccgccgattcgcattcgtgcggcaacatatcccaccgcgattacgatgccgataacgcagaagccttgcatggcgctgattagacctggcataatcctccctttcgccaccccagtgtggcacataaaaatgtattcggccgcaaaatctcatgtagtgagtgtgctgggcccgccgcccacgcggtacgctgttcacatgacgcttgaattgaaccgcaccgcatccactgccgagcagctgaacagcctgctcacccagatcatggagaacttctccgtgtccgaccacgagggccccctcaccgacgaggtcgaggccttccttaacgagcaagagcacctgaccgtccgccgtcacggcgacacagtggtggccagcaccgacttcggcaagccgagccgtgtgatcttggccgggcacctcgatactgtgccggtcatcgacaatttcccaccaaagtggctggagcccggcgattcgctgattcgcgaagaaatcgcccacgctcatcccgaagaccgcgtgctgtggggccgcggtgccaccgatatgaaggcctccgacgcggtgatgctctacctcgccgccacgctcgacggccgcacgccggaaaccaccccgaaagtcgacctcacctacgtcttctacgaccatgaggaagtcgtcgccgaaaagaatggcctacgcaaagtcgtcgaggcccatcccgattggaccaccggcgatttcgccatcatcggcgagcccaccaacagcggcatcgagggcggttgcaacggtacgattcgcttcgacgtcgtaacccacggcgtggccgcgcactccgcccgtgcatggatgggggagaacgccatccacaaggcggccgacattctgaaccgactcaacgcctacgagccggccaccgtgaacgtggacgggctcgattatcgcgagggcctcaacgccacgctgatctccggcggcaaaggcacgaacgtcattccggatgaatgccgcgtacacgtcaactaccgcttcgccccggacaagtcgttggccgaggccaaggctctgatgatgggcgcggacgccggtgccgaactcggcaatggcgagcatgtggctaccggcggcgtgttcgagggctacggcatcgaaatgaaggacgaaagcccctccgcgcgcccgggcctgaacgccccgctcgcccaggatctggtccgactggttaaggagcgcactggccgcgacccgctggccaagctcggctggaccgacgtggcacgcttctctcagctcggtatcccggccgtcaacctcggtgccggcgatccgctgctggctcacaagcacgacgagcaggtgcctgaatccgacctgaccgccatggccgcaatccttaccgactggctggtctgacacctctctagctcccctccctgaggggagctgtcaccgcgggggaggggagccgagagaacgtcagcctcgccgggccacgcccgcacaaaatatgtggcatactaaaggatggtggttctgcataaccatcagcgtgcgagatggcgtcgatccccttgcggctcttgagaatgagacaacgcaagcgccggtgtccgccacccgcaggacagacttgagacgaagttgcctttacgcggcgcgttttcgtgcggccacggtgagagcgtggtgtgagacaagcgtataggcctggaaataggcgtcgtgatgcagcgcgccgcgaggagcattgtgcccactgacaaccgtgaaggtttcgtcaacgacggaaccgataattcaaccgtatccaatgccgattcggctgcagccgtgaacgctgcgcctgccgccgcctcccagcccgccgaacctgttcgccgtcgtcgtggcggccgccgcgtggtccgcggcaccggtgctgccggcgcttctctggaactgcaagtgcaggaacgcgccccgctgttcgaagcccccgcgcttcccgatgccggcactgcggccgattccaagtcagccgattccagcgattccgatgaatccagcgattcccaggattccgccgaacgtccaacccgccgccgttcgcgccgcgccgcttccgcagtggccgactcggatagcgaggatgatcgtcctcgtcgttcgcgccgcactgtcagtgccgatgatttcgatgacgatgacgccccacgttcccgccgccgttcggttgtggacgatgacgattacgacgaggaccgcccggttcgccgccgctctcgctcccgccagtccgacgatgatgactacgaggatcggccggttcgctcccgctctcgccgtgcgtctatggatatggatgatgatgacgaggaccgtccggttcgccgtcgttctcgccgtgcagttgcggatacgcacgaggacaccccggatgagcgcctgttcgacgcggtcgaatccctgccctctggccacgaggccgtgcgtcgcggcaagccgatgacgtccctgctcttccaggaaccggtactgcccgccgctgtggatgcgcacgataccgctgacactcgtgatgacgatgttgacgacgacgaacgtccgtcgcgtcgctcccgccgctcgcgcagccacgatgatgacgacgcgcagccgcgcagccgtcgccgcgacgatcgcggccgcgcctccgccgaccgtgacgcttcccgtgacgccgcgtccggcgataccaacgccgatcacgacgatttcgacgccgacgacacctcggactcccgccgttcgcgccgctcccgccgtctgaacgcccaggagcgccgtgcagccgccgaagtcgagcagattgaggaagacctcgagctggacgatatcgcctactcgccgattgccgaagaggagggcgacgaagaatccgacgccacccgcacccgttcgcgccgtcgccgccgtcgcggctcacgcggcgaaaccggtgccaacggcgagcacgataccgccgagaacgatgccgaagatacgcgttcccgccgtcgtgacgatcgcgatgatcatgaccgtgatcgcgatgaggacgatgaggagcagaccgtcactcgccgtcgccgccgccgtcgtggcggcaagaacggcgagggcaccgacgaccagagtcagaacagcgaacagccgctggtccgacgctcccgcaagcagcagtacatcgacgagatcactgatgtggaaggctccactcgtctcgaggccaagaagcagcgccgccgtgacaaccgccgtgagcgcagccgccagagccagctcatggaacaggacttcctcgcacgccgcgagaacgtggaccgcctgatggtggtgcgtgagaaggaacatcacacccagatttccgtggtggaagacaatgttctggtcgagcattacgtctccgacattcaggaagtacagaccgtcggcaacatctaccttggccgcgtgcagaacgtgctgcccagcatggaggccgcatttgtggacatcggccaggcccgcaacggcgtgctctacgccggcgaggtcaactgggatgccgctcgtctcgaaggccagccgcgccgcatcgagctggcgttcaagtccggcgacccggtgctcgtgcaggtcactaaggacccgatcggccacaagggtgcccgcctgacctctcaggtcacgctcgccggccgcttcctggtgctcgtgccatccggcggcatgaccggcgtgagccgcaagctttcggagcgcgaacgcagccgtctgaagaacatcgtctccaagatcgccccgaaagacatgggcgtgatcatccgtaccgcagccgagggcgcatccgaagacgccatcgtcaaggatctcgaatcactggtccgccagtgggagcgcatcaacgccaagcgcgaggaattctggcacggcaagcgcccgaagctcctgcagggcgagcccgacgtggccatccgcgtggtgcgcgacatcttcaacgacgacttcagcaagctcatcgtggaaggtgacaaggtctacgaccgtatcgaggaataccttgacaccatggcccccgacttgaaggacaagctggagaagtgggacccggccgagcatgaaggcaaggacgtgttcgacaagtggtccatcgactcccagctgcgtaagggcatggagcgtcaggtctacctgccgtccggcggctcgattgtcatcgatcgcaccgaagccatgaccaccattgacgtgaacaccggccgctttatcggcaagggcaagtccttggaagaaacggtgacgcgttgcaacctggaggcgtctgaagagatcgcccgccagctgcgcctgcgcgatatcggtggcatggtgatgatcgactatgtggatatggtcatgcccgccaaccgcgatctggtgctgcgccgcttggtcgaatgcttggcacgcgaccgcaccaagcatcaggtggccgaagtcacctcgctcggtttggtgcagatgacccgcaagcgcatcggccagggtctggtcgaggcgttctccgaggaatgcccgacctgcaagggccgtggtttcatcctgcatgatcagccgaccgtttcggccgactacgacgatccctacgcgcttcgcggtggcgacccgttcgtcaaaaccaacaagcacggtcgcggcaccgctcccgctcccgaaccggctggttccagcgccgacgtcaaagccaaactggctcagattgccgccgctgccgtcgctgccaacaacacggcggaagagtaagcggaagagtaacaggtgtgtcgtgcttgacacgcgggcaaaaatcatttgatttagtccgcatggtggtgtagattcgaaactcggtgtctgaccgcaagctcggtgcgtgttaggcaaggtagctttccaaaacataaaaggaacgataatgtacgcgattgtgaaggccggtggccatcaggaaaaggtcgaggttggcgacgtcatcctcgtgaaccgtctcgacgctaagaagggcgataccgtggaattcccggtctccctcgttgtcgatggtgacaaggtcacccttgccgccgccgatctggccaaggtgtccgtcaaggctgaggttgtgaacgacgaagccaagggcccgaagattagcatccagaagtacaagaacaagactggtgttgctcgccgtaagggtcatcgccagaagctgactatcgtcaagatcacggcgattgcctgagttatagaaaggaccatgaatcatggcacataagaagggtgcgtccagctctcgcaacggtcgcgattctaacccgcaatacctcggcgtgaagaagttcggcggcgaagccgtcgtggccggcaacatcatcgttcgccagcgtggcaccaacttccacccgggccacaacgtcggcatgggcaaggatcacacgctgttcgccctcaccgatggctccgtgaagttcggtgtgcgtcgcgaccgcaaggttgtcgacgtcatcgcctgagcgatatagcgtcaagcttttttcaagccgcgcccgtaaggacgcggcttttttgtaaggtaatcaatatgagtgattttgtggatcgagtaaccgtccatgtcaagggcggcgatgggggcaacggttcggccggcatccgtcgtgagaaatacaagccgttggccggcccgaacggtggcaatggcggcgacggtggttccgtggtgttcgtggccgaccgtaacgccaccagcctgctcgactatcgtttcatgccgcatcgtgtcgccggcagcggcaccatgggtttgggcgacaataaggacggctccaagggcgaggacctgattctgcccgtgccctgcggcaccgtcgtctttgaggcgcgcggcgaacagggcaaagccaagcatcccggcgcgcagctcgccgacctgcgccacgagggcgaccgctgcgtcgtcgcccaaggcggtgccggcggcctcggcaacatcgccctggctaacaagacccgccgcgcccccggcttcgccctgctcggcgaactcggtgaagagcgcgacgtgattttggaattgaagtccatcgccgacgtggcgttggtcggtttcccctcggccggaaagtcgtccctgattgcggcgatgagttccgccaagccgaagatcgccgactacccgttcaccacgctggtgccgaatctcggcgtcgttatcgccggcgactctcgatacaccatcgccgacgtgccgggcctgattccgggcgcctccgaaggcaagggcctgggactggagttcctgcgccacatcgaacgtaccgaaatcatcgcccatgtgatcgattgcgccacgcttgaaccggaccgcgacccgatgtccgactaccacgcgctggaaaacgagttggcgctctacgccgacaagctcgagctgccgttgggtgccatcccgattcccgaacgcccgcgcatcgtgattctgaacaagatcgatgtgcccgaggccaaggaattggctgagttcgtgcgtccggagttcgagaaactcgggctgaaggtctttgagatctccactgcctcgcacgagggtctaaaggagctcaacttcgcgttgtctgcgctggtgcacgagatgcgtgaggaagtggccaaccgcgagcaggccgaagaggaggctcgcgtggtcatcaagccattggagaccaagggccgccgtccgcgtcgtgctgacgagggcggcagtgcgcttgagttcacggtcgagcgccgcgaactcggcaatggcgaagtgttcttcgaggtgcgtggcgtcaagccggagcgctgggtcatgcagaccaacttcgacaacgacgaggccgtgggctacctggctgaccgcttggccaagctgggcgtggaggacgagctgcgccgcaagggtgctcaccccggcgacgaagtgcgcatcggtcgtggtgcccgtatggtcgaattcgattgggatccgaccatctccgctggtgccgaaatgctcgacggctccaacctcggtgcccgaggcaaggatctgcgtctcgaagagctggacccgcgcacgcaccgccgctccaacgccgaacgtcgtgcccaataccacgagatgatggacgcccgtgccgccgtgcgcgacgcgatgatggccgaacgcaaggccggccactgggccgacccgaccgttgacgacgatcgccatgacgaaaccagcctgttcggccacggtgagtccagcgaagatggtgaaaccgaggaataaatgagcactccgagtcaggccgaggtgcggcgcatgatcgccgcagccggaaccattgtcgtgaaagtcggctccagctcgctgacccagccgagcggtcacctcgacccggacaagctcgacgcgttggccgcggccttggctcaggtccgattgatgggcggacgtgtggtgctggtctcgtccggtgctatcgccgccggtttcgggcctctgggctttgactcgcggccggtggacgtggccactcagcaggccaccgcagccgtcggccaagggctactgatggcccgctacgagactgcgttcggtcgattcggtattcgcgtcggccagattctgatcactgccgaagatacgattcgtgccacccagtaccgcaatgtggaacgcacgctggaccgtctgcttgacctcggcgtggtgccgatcatcaacgaaaacgattcgttggcctcgaacgagattcgcttcggcgacaacgatcgactctccgcgttggtggccaacctggtgcgggccgaagccttggtgctactgaccgacgtggacgcgctgtacactgcgccgccctcgcagcccggctcccgccgtgtggaatatgtgcccaacgtgattgatgcgctgggcgacatccaagtctccggctccggctccaaggtcggcaccggcggcatggtcaccaaactcgaggccgcgcgcgtggcggccgtctcgggcatccccacggtactcacctgcgcctcgaacgcgggccctgcgatgatgggcgatccggtgggcaccgtgttcgcaccggttaaggcccgcggctcctcacgccgtctgtggatcggcttcgccgccgacccgcgcggcacgattgtggtcgatgcgggtgccggccaggcgattcgcggcgggcgtgcctcgctgctggcggccggcgcgctcgaagtacatggcgatttttccgccggcgatccggtctggatcgatgccgaaagcggtgaacacctggcccgaggcctcgccggcttcgattccgaagaaattccgcagatgctcgggcgtaacaccgcccaactcaagcgtttcctcggcccccagtacgcccacccactggttcatcgcgacaatctcgtgctcgtgtgactgatggaatctgtcacacgacagattccatcaccatagtgcggctctggcgatttttcgtgctgtaggtttagcatgggagccatgactatggcgcaatggcagactctttccgaccgtatcaacactgtggcaccgagcgctacgctcgccgtcgattccaaggccaaggccatgaaggccgccggacttgacgttgtcggcttcggcgcaggtgaaccgaatttcccgacccccgcaaacgtggtcaaggctgcggcagatgcctgccttgacccgaagaattacaagtacacgcctacgccgggcctgcccgagctgcgcgaagcgattgcggctaagatgctgcgcgattccggctatgaggtcaatgccgatcaggtcgtggtgaccaacggcggcaagcaggccgtgtatgaatccttccagatcttgctcaacgatggcgatgaggtcatcattcccgctccgtactggaccagctaccccgaggctgtgaagcttgccggtggtgtgccggtcgaagtattcgccggtgccgacgtgaacttcgagccctcgcttgaggcgctggaagcggcccgtaccgagcatacgaaggcaatcatcgtcaactccccgaacaacccgaccggagccgtctggaagccggaaaccgtggaagcgatcggtcgttgggccgtcgagcaccacatttgggttatctccgacgagatctacgagcacctgaactatgacgatgcgcacaccacctacatcggtgccgccgtgccggaatgccgcgggcagttgctggtgctgaacggcgtggccaagacctatgcgatgccgggctggcgtgtcggctggatggtcgctccgcttgaggtggccaaggccgccgccaagctgcagggtcatatgacctccaatgtggccaacatctcccagcgtgctgctttggctgctgtggccggcccgctggatgaggtgcacgagatgcgtaaggccttcgacgcgcgccgccgtgcgattgtgaccgccttgaacgatatcgagggcgtcaactgcccgactccgaccggcgcgttctacgtttttgcggacatcaccgctttgcttggcaagccgctgggtcccaagggcacagtgtccgatacgtccgctgactttgccgccgcactgttggatgaggcccacgtggccgccgtccccggcgaggcctttggtgctcccggttacctgcgtttctcctacgcactggctgacgaagacctagccgaaggcatgcgtcgattcaaggaatgggctaactgagaagagtcgcgtgccacgcgcgcgacacgcgatttgcgataatccaccggagccgttactataacgacttggcggtttcgccgtggcgaagcgttctctacggaacgcatgccgaggtggattttcacctagggaagtggcgcaattggtagcgcaacggtctccaaaaccgtaggttgtgggttcgagtcccgccttccctgccaagtttctaataatcaagcagctgacgcgaggtacggaatggctaagacgagcaagagtgaaaaggcagtcaagccgaatgtcttcatgcgtatcggtctgttcatcaagcagatcatcgacgagcttcgcaaggtcgtgacccctaccgccaaggaactgttcttctggtctctggccgtattcatcttcgtgctgctgctgatggccctcgtgactggcatggacttcggtctaggcaaggccacgctgtgggtgttcggctgatccgcacaacctaaggtgaataacaacgcatgagtgatgaactgaatctcgagaacctcgacgccgtcccggctgaggagcctgttgtcgaggcttccgaagctgctgccgatgaggcagctgccccggtcgaaccggtcgctgacctttccgcagaatctgacgcatccgtcgacaatgcagatgttgagtccgacgctccggcggcgactgaatccgctcccgttgcttccactcagaccgagaccgtttctctggatgaggacgaggaagaagtcaacgaatccgagcaggccgaggagaccgatgccggtcagcaggccgttgacgaattctccaagtccctgcgttcccttgatggcaagtggtacgtgctgcacacctactccggctacgagaagcgcgtgaagaccaacatcgagtcccgcgtcgcctccttcggcatggaagaccagatcttccaggtcgaggtgccgatggaagaagtcgagaagcacaccgagaagggcaagaaggtcatcacccgcgtgcgtgttcctggctacgtgctgattcgtatgtggccggatgagaacgcccgccgtatcgttcgtgagaccgaaggcgtgaccggcttcgttggcccgaccaaggatccggcgccgctctcccgcaaggaagtcgtggcgatgatggctccgatgattgcttccgaggcactcaaggccgccggcgacaagcccgccgccgccaagaagcgcagggtcgaggtctcctacgccgttggcgatcaggtcaccgtcaccgatgggcctttcgccaccatggccgccgttgtttccgacgtggagcccaccactcagaagctcaccgtgctcgtgtccatcttcggccgtgatacgccggtggagcttggcttccaccaggttcagaagctagattaactcccaaactttgcagagcccgaccatcgtggtcgggctttttgtgttgtccgggtggatttgcataataggaaagcttgtgtctggagaggagactcgctagcacagcacagcaatataagttgcgggaggagaccgaccacaggccgattgcctacagcatgcacggataaataatgagtcaagaccgagcatgatggcagacagccgaacctgaggacggcgaccattcgaaccgcgttatagaaagaagaaccataatatggctcccaagaagaaagtctcggcgctgatcaagctccagatccaggctggcaaggccaacccggccccgccgctgggcccggctctgggttcgcatggcgtgaacatcatggacttctgcaaggcatacaatgcccagacgcaggacaagatgggtcaggtcatccctgtcgagatcaccgtttacgaagatcgttccttcaccttcgtgctcaagaccccgccggctgcagctctgctgaagaaggccgctggcgttgagaagggcaccgagaacccgctgacccacaaggtcggctctgtcaccaaggcgcaggttcgcgaaatcgccgagatcaagatggaagatctgtctgctcgcgatatcgaggccggcatgaagatcatcgagggcaccgctcgctcgatgggcatcacggttacggactgataaggagaaggacagatggtaaagcgttccaagaagtaccgcgaagccgctgagcgcgtcgatcgcaacaacctctacaccgccaacgaggccatcgctctgctcaagagcatgccctcctacaacttcgaccagaccgtcgaggctgtgttccgtctgagcgttgacccgcgtaaggccgaccagctcgtgcgtggtaccgtcaacctgcctcacggcactggtaagaccgccaaggtcctcgtgttcgcccgtggcccgaaggctaccgaggctaccgaggctggcgccgacatcgtcggtgatgacgacctgattgcaaaggttcagggcggcttcctcgacttcgacgccgtggttgctactccggacatgatgggcaaggtcggccgtctgggccgtgtgctcggtccgcgtggcctgatgccgaaccccaagaccggcaccgtgaccatggatgtcaccaaggctgtcaaggacatcaagggcggcaagatcgagttccgtgtcgacaagaacggcaacctgagcttcctcatcggcaagatgagcttcgatgagtccgctctggacgagaacttcaaggctgtggccgacgaagtcaagcgtctgaagccgtccaccgtgaagggccgttacctgaccaaggcaaccatcacctccacgatgaacccgggcgttccggttgacccgaacaccctggcctgaagctagcgagcttcaatagctactgaaagggacttcccgtaaagggaagtccctttttgcatatgcgatgaccggttgcgagaaggtgaacctggatggtcacgcaatcgaattcttgcaacacgccgatgaacacatgaatttgttacgcatcggcaatgcaaaacggattattctgatatcagaacagcgcaaataggctgtttgcgacacgccgggcgaagcctgtcgtttcaacgatttgggcttatcttcgtgcgcccgatttgcgcgagtccgtgaatgcgtgtaagttattcacctgttgccgctcagcgcggcgggttccttcctctggttggtttcccgtctggctggtgtggtggtggtttgagaactcaagagcgtgtttgtactacttctttatagtcaatgattgccagttcattcctcgcctgattgcctgtcgtggtggttgggtacccgggagggtttgatgaggggtgaggttttttgagggcgtccttccttaaggacgtgctcgtcaatttttgttttgagagtcatctattcggatgcttttcatgaagtttttttgtggagggttcgattctggctcaggatgaacgctggcggcgtgcttaacacatgcaagtcgaacgggatccatcaggctttgcttggtggtgagagtggcgaacgggtgagtaatgcgtgaccgacctgccccatacaccggaatagctcctggaaacgggtggtaatgccggatgctccagttgatcgcatggtcttctgggaaagctttcgcggtatgggatggggtcgcgtcctatcagcttgacggcggggtaacggcccaccgtggcttcgacgggtagccggcctgagagggcgaccggccacattgggactgagatacggcccagactcctacgggaggcagcagtggggaatattgcacaatgggcgcaagcctgatgcagcgacgccgcgtgagggatggaggccttcgggttgtaaacctcttttatcggggagcaagcgagagtgagtttacccgttgaataagcaccggctaactacgtgccagcagccgcggtaatacgtagggtgcaagcgttatccggaattattgggcgtaaagggctcgtaggcggttcgtcgcgtccggtgtgaaagtccatcgcttaacggtggatccgcgccgggtacgggcgggcttgagtgcggtaggggagactggaattcccggtgtaacggtggaatgtgtagatatcgggaagaacaccaatggcgaaggcaggtctctgggccgttactgacgctgaggagcgaaagcgtggggagcgaacaggattagataccctggtagtccacgccgtaaacggtggatgctggatgtggggcccgttccacgggttccgtgtcggagctaacgcgttaagcatcccgcctggggagtacggccgcaaggctaaaactcaaagaaattgacgggggcccgcacaagcggcggagcatgcggattaattcgatgcaacgcgaagaaccttacctgggcttgacatgttcccgacggtcgtagagatacggcttcccttcggggcgggttcacaggtggtgcatggtcgtcgtcagctcgtgtcgtgagatgttgggttaagtcccgcaacgagcgcaaccctcgccccgtgttgccagcggattatgccgggaactcacgggggaccgccggggttaactcggaggaaggtggggatgacgtcagatcatcatgccccttacgtccagggcttcacgcatgctacaatggccggtacaacgggatgcgacgcggcgacgcggagcggatccctgaaaaccggtctcagttcggatcgcagtctgcaactcgactgcgtgaaggcggagtcgctagtaatcgcgaatcagcaacgtcgcggtgaatgcgttcccgggccttgtacacaccgcccgtcaagtcatgaaagtgggcagcacccgaagccggtggcctaaccccttgtgggatggagccgtctaaggtgaggctcgtgattgggactaagtcgtaacaaggtagccgtaccggaaggtgcggctggatcacctcctttctacggagaattcagtcggatgttcgtccgacggtgtgcgccccgcgcgtcgcatggtgcgatggcggcggggttgctggtgtggaagacgtcgttggctttgccctgccggtcgtgcggtgggtgccggggtggtatggatgcgcttttgggctcccggatcgccaccccaggcttttgcctggcgcgattcgatgcccgtcgtgcctgggggccggccgtgtgccggcgcgatggcgtggcggtgcgtggtggcttgagaactggatagtggacgcgagcaaaacaagggtttttgaatctttgttttgctgttgatttcgaatcgaactctattgttcgtttcgatcgttttgtgatcatttttagtgtgatgatttgtcgtctgggaatttgctagaggaatcttgcggccatgcactttcgtggtgtgtgttgcttgcaagggcgtatggtggatgccttggcagacaggaccgatgaaggacgtttgaggctgcgatatgcctcggggagccgccaacagggctttgatccgaggatttccgaatgggggaacccaccgaccgtcatgggtcggtaccggcttcggccggggggtacgcagggaagtgaaacatctcagtacctgcaggaaaggatattccgtgagtagtggcgagcgaaagcggatgatggccaaaccttgcgcgtgtgatacccgtcgggggttgcgcgcggggtgttgcgggatcgcgtgcgccggctccgacgggccggccggcagttgcagaaaaccatgtgtcaggggaaccgggttgaataccgggccgcagagggtgagggccccgtacctgaacgcgcatggtctgccgatcgcgtctcccaagtagcacgggtcccgtggaaccccgtgcgaatccgcccagaccgttgggtaagcctgaatattcctgtctgaccgatagcgaacgagtaccgtgagggaaaggtgaaaagtaccccgggaggggagtgaaacagtctctgaaaccgtgcgcctacaatccgtcggagcccttttgtggggtgacggcgtgcctatcgaaaaatgagtctgcgagtcagtggcatgtggcgagcataacccgtgtggggtatgcgtagcgaaggcgagtcttaaaaggcgtttgagtcgcgtgtcctggacccgaagcgggatgatctagccctgagcaggttgaagcgcgggtaagaccgcgtggaggaccgaacccacctgggttgaaaaccggggggatgacttggggctaggggtgaaaggccaatcaaattccgtgatagctggttctctccgaaatgcatttgggtgcagcgtcgggtcattacgtcccgggggtagagctactggatgcttgcgggcccgtatcgggtaccaacagcaaccaaactccgaataccggtgacgcgtatcccggcagtgagtcggcgggggataagcttcgtcgtcgaaagggaaacagcccagaccgtcgtctaaggtcccgaagcgtgtgctaagtgggaaaggatgtggagtcgcatagacagccaggaggttggctcagaagcagccacccttgaaagagtgcgtaacagctcactggtctagtggttccgcgccgacaatgtagcggggctcaagcacaccaccgaagacgcggcagtattttgtactgggtaggagagcgtcccatgaggggcgaagcggccgtgtgaacgcgccgtggacttcatgggagtgagaatgcagacatgagtagcgagagacgggtgaagatcccgtccgctggatgaccaagggtttcagggccacgttcatcgtccctgggtgagtcgggtcctaaggcgaggccgacaggcgtagtcgaatggatgaacgggtcgatattcccgtaccggctttcagccgccaaaaccgaggcttggagtactaacctccgggtccgggcttactgctccttcgggggcgggatgccctggcctgttgggaccgatccttgtagtaggtcagcgcaggagtgacgcagaagggtagccggccgcggaggtggtcttccgtggtcaagcacgcagggcgtgggacaggcaaatccgtcccgcatgggtccgaggtgcgatgatgggggccttatggcccgatatccggtgatcccggctgccgagaaaagcttcggcgtcaggctcgaagccgcccgtaccccaaaccgacactggtggtcaggtagagaataccaaagcgatcgagcgaatcctggtcaaggaactcggcaaatcactcccgttccttcggtttaagggagacccccgatggtgaacacacttgctgtgggagcttttgggggtggcacagaccagggggtagcgactgtttaccaaaaacacaggtgcatgcgaaggcgcaagccgctgtatatgcactgacgcctgcccggtgccggaaggttaagaggatccgtcagccttcgggtgaagcggtgaattcaagccccggtaaacggcggtggtaactataaccatcctaaggtagcgaaattccttgtcgggtaagttccgacctgcacgaatggcgtaacgacttccccactgtctcgaccaggagctcggcgaaattgcagtacgagtaaagatgctcgttaagcgcagaaggacgaaaagaccccgggacctttactataccttggtattggcattcggtgtggattgtgtagcataggcgggaggccgagaggcgcggtcgccagaccgcgcggagccgtaaggtgaaataccgctctgttcgcattggatgtctaacctcgaacagtcatcctgttcagggacagtgcctggcgggtagtttaactggggcggttgcctcccaaagagtaacggaggcgcccaaaggtccgctcagcccggttggcaatcgggtggcgagtgcaagtgcacaagcgggcttgactgcgaggacgacggtccgagcagggacgaaagtcgggactagtgatccggtgccggtgtacggacgcggcatcgctcaacggataaaaggtaccccggggataacaggctgatcattcccaagagtccatatcgacgggatggtttggcacctcgatgtcggctcgtcgcatcctggggctggagcaggtcccaagggttcggctgttcgccgattaaagcggcacgcgagctgggttcagaacgtcgtgagacagtttggtctctatcctctgcgctcgttggaatgctgaggaggcctgcccatagtacgagaggacctgggtggacgaacctctggtatgccggttgtcacgccagtggcacggccggttggctacgttcggaagggataaccgctgaaagcatctaagcgggaagcctgctccaagataagcattccgtggaaccttcgagttcctgtagtccccatgcagaacacgtggtcgataggccggacgtggaagccccgcgaggggtggagccgaccggtactaacggacgaaaggcaacactaacattccaacccctggcggttggaccgcatcttcctcctgcaaacggcaccagacggcaatgagcattgtctggccacaagacgaaacatcgacatatccgcgtccgctgtccggttcccaggccgccacaggccggcagaccccagcgtctgaccgtataagagaagatttgcggcggccatggcccaggtgagacgcccggtcccattccgaacccggaagctaaggcctggcacggcgatggtactgcacccgacagggtgtgggagagtagcacgccgccgcatcacacgtacaggaagccccttggagcacacgccccaaggggctttccctatatccgaaaccaacaagacaagacaccgacaagacataggctctcgcacctagggtgtggccgaatcgaaagcatatagaagagggaaccctccaatgacggagagtccccactttgcgtatctggaccgataaaggtctagaaattgaaattgtccggatcagcaccgttgcgcttgccggtgttgatggcggagatggcggtcatatcatcgaccgataggttgaagtcgaagacctcgaagttctgcttgatgcgctcggcatgagtggacttgggaagcacgacgatgccgcgctggatgtgccaacgaatcactacctgtgcagcagacctgccgtacttggcaccgattccggccagtactgggttgctgagtaggttaccgccggtgccgccgagcggactccaagcttcagtgtgaatgcccttggcacgcagctggccaataagctcttgattggtgaattgtggggaagactcaacctggtctacagcaggcaccacatcgctatgggtcagtagctcatcgatatgatgcttttggaagttgctgacgccaatggccttggcacggccagaggcataaatctcctgcaagtcgtcccatgcctgctgccagccgtctgctggccagtgaatcagatacagatccacataatccacgcccaagcggtcgaggctttcttggaatgcatccttgccgcggcgtgcgcgaatatcgtcattccacagcttggtggtcaagaagaaatcgctgcgcggcacaccagcacggcgaataccttcacccactgaagcctcgttgtggtaaatcattgcggtatcgatatggcggtagccattctccagagccgtctgcaccgcgttcactgtagtatcaccatccggtgtctggaatacgcccaagcccacctgcgggatgacagtgccgttgttcagcatgattgtcgattgaattgccataatgcctcactagtcgtagtattcgttcaatttcccattctagaaacaagacgatgcaataagccgcgttttgctggcaaagaatgattctttttttcagcgctacgatgaacgatatgactacggaatatgtggctgcatttgatgcggggaccacggcgttgaagggtgccttagttaatgggcagggttgcattgtagctagtgcgagtagcgaacttgaccttattatcaacggcgactatcgggagcagagccccgatcaatggtggcaagctttctgctcggcctccaggcacatgattgagcaggcgcggcaatccgagtcagaattcaatgtgactcgcattcgtggcatcattttcagcggtcagatgcaggatgttattgttttgaacggcgagctcaatcccgtccgcaatgccattctgtattcggatggccgagccgaggaacaggccaagcaactcgccgagacatatcagggcggtgcagaacgtttcctgaacaccgttggtaaccggctcgaaggctgcttgccgttgcccaagttgatgtggctgcgtgaacacgagccggaaacgtacgcgcgcattcgtcatgtattgatcagttccaaggactacttgatcgcccaattaactggcgaatgcgtgggcgatgtggcggcgtgttccacagctggggccatgaatatccgtaatggccagtggaatgccgaattatgcgaggtcgcaggaatcgacatgaccatattgccacacctgcacaatccgcaagacaacattggcacagtgacggaatccgctgcacaacgcaccggtttttccgccggaactgcggtatacgcgggcattggagacgcgggtgccaccacacttgccagcggtgtcagccaccctggtcaatacaacatcaatatcggcacctcaggctggatcgccaccgtttcgcccgagccgttcactgacaagccaggtgctgcgaatctggcatttggcgtggaagaaggcttcgtgaatgccgtgccattcctcaacgccggtgacgtgcataaatgggttaccggcgtattcgctgatggcgattacgtagaggcgcatcgtcttatcgaaacatccaaacccggctccaacggtgtgctatgcctgccatatctggtgggggagcgattccctgttatgaatccgaatattcgcggtgcctatgtgggcctcgatccagacaccgccaaggcagacatgatgcgtgccgcgcttgagggtgtggccttctccattcgtcaaggtatggaaagttttgacgccaaacccaccgagatttccctgattggcggcggagccagagaaaatgcgtggtgccagattctggccgatgtgttggagcatcctattgaagtgttcgccaatgccgatattctgccagcagtggcaatggcctcgttggtattcaatgtaccagacctgctgcaatcagtatgcgaatgcactgtataccagccgaatcctgacaccgcacgcacatatgccgacgcataccggcgattcctgagcctctacccaatgctgcgaacgatggattaggaactgagcatcatgaggcaatcggcgaatttggtccgcaaacatatagtggtcaccggactggtgcaaggcgtgggattccgttattttacggtgactcaggcacgtcggcttggtgtacagggctgggtgcgtaattgccgcgatggctcggttgagctggaagcacaaggcagcagcgacgcagtgcaagccttggttgagcaattagccattggcccgcgatggtccgaagtgagtcacgtcgccgtgcatgacatgccgattatcgatgagaccgctcgggcatttggcgtgcgtcaataacctgtatcacgaacccacatcacgcacgataatctcacgatacgggtgaacatgggcgttcctcgccgcttaggcctcgcacattgctacgatggggcgttatgagtgagaacatcatgcgaatcattgacctgcgtggtcagaacctgtcccgtgccgaactgcttgccgcgatgccgcgtgctgcaatgggtacttccgaagccaccgatttggtgcgtccgattctggacgatgtcaaagaacgcggcgccgctgccctgcgcgacttcgaggagaagttcgatcacgtgcgtcccaagaacctgcgcgtgccggtcgaggcgatcaaggacgccctgaccacgctcgaccccgaagtgcgcgccgccatcgaggaatcggtgcgccgcgcccgcgccgtggccgccaaccaggtgccgaaggacttctacaccgacctcgccgaaggcgcccgcgtggccgaacgctggattccgattcagcgcgtcggcctgtatgtgcccggcggcaaggccgtctacccgagctccgtcatcatgaacgctgtgccggcccaggccgccggcgtcgaatcgctggccatcgccaccccgcccgcccgcgacaatgaggaaggcctgccgaacaagaccatcctcgccacctgcgccatcctcggtgttgacgaggtatacgcggtcggcggcgctcaggccattgccatgttcgcatacggcgccaagggcagcgagccgcaggacggcgacatcctgtgcgatccggttgacaagatcaccggcccgggcaacatcttcgtggccaccgccaagtcgctggtctccgcattcgtgggcattgacgcggttgccggccccaccgaaatcggcatcatcgccgacgaaaccgccaacccgagcctgctggccgccgacctcatcggccaggccgagcacgatgagctcgccggttccgtgctgttcaccgactccaccgagattgccgacaaggtgcaggagagcctcaagtaccgcgtgccgcgtaccgagcacgccgagcgtgtccacacgtcgctgtccggcacccagtctgccatcgtgctgaccgacggtctcgaccagtccatcgacgcggccaacgcctacgccgccgaacaccttgagattcagaccaaggatgccgatgcggtcgtcaagcgcatcaagaacgccggtgccatcttccgcggtccgtactccccggtgccgctgggcgactacatgtccggctccaaccacgtgctgcccaccggcggcaccgcccgcttcgccgcaggcctcggcgtgcacaccttcatgaagccggtcgaagtcatcgaatacgacgaggaaggcctcaaggccctcgccgcccgcatcaacgccttcgcggtatccgaggacctgcccgcccacggcgagtgcgtgctctcccgcttcgtcaaggatccgtatgacaaggccaccctgcgcgagcaggagaaggaagccggtctgcgatgagctcgattcctgcaaacctgccgctgcgcaacgacctgatcggtgaggagccgtacggcgctccccagctggacgtgccggtgtgcctgaacgtcaacgagaacccgtatgcgccggacccggccgtatgcgacaccatcgccaagcgtgtgcgtgaaatcgcccccacactcaaccgatacccggaccgtgagcacatcgaattgcgtcaggcattctccgattacctggcccgcgaatccggtacccgtctggacgtggacgagctgtggggtgccaacggctccaacgagatcatgctccagctgttccaggctttcggtggcccgggccgcaccgcactcggtgccgacccgacgtactccatgtacccggagtacgcccgcgacaccttcaccggttggaagctcgcccaccgcaacgccgacttcacgctgaacgtcgacaaggtgcttgaggccatcgccgaggtcaagccctcgatggtgctgctcactagcccaaacaacccgaccggcactccgttgccgatggaggatatcgaacgtattctcgccgcctgcgaaaccgctgaagtggtcggcgcgggcgagggcgtgcatccgattctcgtcatcgacgaagcgtacgtggaattccgcaagcccggcaccccgagcgccgtgagcctgatcaaggaccacccgaacttggccgtcagccgcaccatgagcaaggccttcgccttcgccggtgcgcgagtcggctacctggccgcgtccaagggcatcatcgactgcgtgcgtatcgtacgtatgccgtaccacctgtccgccgtgactcaggccgccgcactggccgccttcgaacacgccgacgagcagctgagccgtgtcgagcacctgcgcgaaacccgcgaggccaccgccgcatggctcaaggaacagacctacaaggaccagccgcttgaagtggccgaatccggctcgaacttcctgctgttcggcgggcacttcgacaagcgtgaagccatcttcgacgagctcctgaagcgcggcgtactcatccgcgtggtcggaccggacggttggctgcgcgtgtgcatgggcaccgacgaggagatggaaaccttccgtaacgcccttgttgaagtgcttcgtatagtggaagcagcataagggacgtttctttccgattgcggcgagacccgaagcgattcgagtcccgccgcaatccaatatgacgaatcacacaggagacatgatggcaagaaccgcgcacatcgtccgcgaaaccagcgaatcacacatcgacctcgaactgaacctcgacggcacaggcaaaaccgatatcgatacatccgtgccgttctacaaccatatgatgaccgcgctcggcaagcattcgctgatcgacctgaccatccacgcccacggcgacaccgacatcgacgtgcaccacactgtggaagatacggccatcgtgttcggcgaagctctgaagcaggctctcggcgacaagaaaggcatccgccgctttgccgacgccaccgtgccgctcgacgaggcgctggccaaggccgtggtcgacatttccggccgcccgtactgcgtgtgcagcggcgagcccgaaggctacgaattctgcatgatcggcggccatttcaccggctcgctggtccgccacgtcatggaatccatcgccttccacgccggcatctgtctgcacatgcaggtgctcgccggccgcgacccgcaccacatcgctgaagccgaattcaaggcgctggcccgtgcgctgcgcttcgccgtggaaatcgacccgcgtgtagacggcgtgcccagcaccaagggagccctgtgatgaccgacgacaagttcgatccggacgaatcgcacttctccgacgaggagcttgaggctgcgctcgccggattcgagaaagaattcgcggacgattcggtatccggcgatgccagtgataccagtgatgccgataaaacagcggacgctgcttcagcgaagtccgattccgacgcgaatgatgatacggctgataaggcttccgctgattccggccagcctatgaccgacgacgtcaccgggtccgttgcggatgcggtgaacgaggccatggccgacgtggtcgacccctcgctcggcttcgacaacgaactcgctggactgttgggtaacaaggcgaaggtggcgctgatcgttacccgtcttgcctccgccgaactgttggccgcgttctgccagctgtcggacatctccgccgcatgcatcggtgccaatcagggggccgtcgcggtgctgaagaatctggacggcgacggcccggaagccgcagccaaggacctgaccaccgtggtatccggcatggccgtgattcttgcagtcaaccgtgccgacaagcttgaagtggccatgtacgtgcagggagaggccggccagagtttcgcgccgcccgtgctgttcacctccacgccgcgcttcgtcgaggacctgatgctcggcatcgtaaccctgaatcaactcaagacccaagggttcgaagtggtggattccgctggactcgaccatgatcaggcgatgcagattctcgccaaccacactaggcgcggacgtggcgggcgcggctcccgcatcgaatagacgccaaccaaaccagtaggggataggagagcagatgaccacagcggttgttttcgattacggtttcggcaatgtacgttccatggtgcgtgcgctcgccaatcttggcgtcgacaccaccctcacctccgactaccggcagtcgttggaggccgacggcctagtcgtgccgggcgtgggtgcgttcgccgcatgtatggaaggactgaagaaggtcgacggcgaccgtgtgatctatgatcgcatccgcgctggccgcccggtgctcggcgtgtgcgtgggcgagcagatcatgttcgaacacggtctggagcacggtgcccatgccgcaggcatcggactgatcggcggttcggtgaacctgctggacgccgacgtggtgcctcacatgggatgggacacgatcgagaccgcccccgattcggtgctgctcaacggcgtggagaacgaacggttctacttcgtgcactcctacgccgcgatggaagtgaagccggcggatacgtcccgcttcgacatcgatctgagcgattcgcccgaacgcgtgagctggtgctcgtacggccgatcgcgctttgtggccgcctacgaacacggcccgctgtccgccacgcaattccacccggaaaagtccggggacgctggctcccagctcctcaagaactggatcgccacgctgtaaaaaagcatgaagctccctctgacgagggagctcaaattgtgtataagtaactgaagaaaggctcttcttatgtcgttgactctgctgcccgccgtcgatgtacgcgatggcaaggccgtgcgcctgcgccaaggcgaatccggttccgaaaccgattacggttcgccgttcgaggccgcccgtacttgggttgaggccggtgccgaatggattcacctggtcgaccttgatgccgctttcggtacgggcaacaatcgcgatcagctgcgagaaatcgttcatgagctcggcgaccgcgtgaacatcgaactgtccggcggcgtgcgcgatgacgcttcgttggacgcggcccttgaggccggtgccgcccgagtgaacatcggcaccgccgctttggagaatccggattggaccgcctcggtcatcaagaagtacggcgaccgcgtggctgttggtctggatgtgcgcggtcacacactggcggcgcgcggctggacgcgcgaaggcggcgacctgtttgagaccatgaagttccttgactccgtgggctgctcgcgttacgtggtaaccgacgtggctaaggacggcatgatgtccggcccgaacattcaattgctgagtgaagtcgctgaacgcaccgacgccaaggtcacggcttccggtggtatctccaagctggacgatttgcgcgccatcaaggaactggctgaaattggtgttgattctgccatcctcggcaagtccctctatgcacgtgcgttcacgctccaggaagcgcttgaagtagcgaagtaggcaaaggactcgccttagcgagactgttaatctaccttcgctcagctatcgcttcactcagacccctcctacggacagcccattgggctgtccgcttaacggctcagcaagggaggtcgccggatttgaggagctttttgaagacggcgtagtcttcatcattctgttcggcgtagctgacggcgaatgaggcgatggcctgatcgaattcgtcggtgccacccatgtaattggcgatcgcaatcgaatcgccggtgcgggcgtgggcgtgcgccaacgaccatgcgcacatgcgtgacagatcgctcaatcccgaagcgttgagattgtcgatatcaatcgaccccttgccattccacaactggcgcacgtaatagtcgcgcggtcggccatcctcggccataaagctcgaccaacccaacagcacatcggccgtattctgaatcagcttctgcccctgaaccacgcgctcaccgtgcgtggcgtacggcgacgcgccgcagtaatgctcgagcacggaatacgtggcctccttcatctgaatcatcatcggatcgtcgatatcacgcgcgatccacaccgacgtccacgcgcgctggcccaccgagcccacgcccaccaccttgcgggccgcatcctgatagcgcaaatgatcgaacacccaacggcgatcgtcgtacagggaatgccggtagctctcgaacagcgtgtctatacgtgcctgcaacgcatccaagtcggcgtaatcatccagctgattgatcggcaccagctcgggcggattggatttgaacctgagcttgccgctctcataacggcacagtttggccgccgccgcgtcgttatccttcagcagcgccttcatggccgcctcacgcagcacacggctgcgtttggaaccggtggtctcgaagcggtcgagcgtctcctccacgtccaggtgctcataccacgcgtcaaggtaatccatttcggagaaccacttcatgcgtgtgcggtacgtgtgtacgcactggaccacggcggcgcgacggtccttctccttgattttgttggcgcgtccgcagatctccaccgaggcggcgagacgtttcagatcccattcccacgggccgatagcggtttcgtcgaaatcattgatatcgaacaccagacgggcggaaggggagcggaaaatgccgaaattgccgatatgcgcgtcgcccacgcactgcaccggaatgccagtgactggcgtggaagccaggtcattggtcatgatgagcacggtgccccggtagaaggtgaaggggctggcgctcatacgcttgtaacgcagcggaatcagatccggtacgcgaatcgcggactgctcctccaaaaggctgatcgcctcacgccggccctccttgaccttccagatggcatgtgcgtccagcggcgccttggtacgagtggcgatgccggcgcgcgaacggtcgcgcgggtcggtggcctgcgtccagctggtcacgtcgacgggcggattggcggatggggtgagatgatcttcgctcatagtcactaccatagtgccgtgccggcatgggcctgaaccatgcctgacatgcggaccggggcatgttgatgaaatctcgcgactcgcaggtgacgaacagtgagatgttaacgcccttcgtaacacggttatggaacgataggcgactatggataaacagcaggagtttgcgctgcgcacggtcgaagaacgcgacgtgcgctttattcgtctgtggttcacggacgtgttgggaacactgaagtccgtggcgattgctccggccgaactggaagccgcgtttgaggagggtctcggcttcgacggttccgccatcgagggcatgacccgcgtgtccgaagacgatatgatcgttcaacccgatccctcgacgttccagatcctgccgtggcgcggtggcccgcaaggtaccgcccgcatgttctgcgacattctgaccccggacggcgagccttcgctcggcgatccacgtcacgtgttgaagcgcacgctcgccaaagccaaggacaagggcttcacgttctacgtgcatccggaaatcgagttctacctgttcgaaagccaggacgactggtccaaggccccgaccccgatcgacgagggcggctacttcgaccacgtgccgcgcagcccaggcatggacttccgccgtgccaccgtgaacatgctcgagcaaatgggcatctcggtggaatactcgcaccatgaggcggggccaggccagaacgagatcgatctgcgatacgcggacgcgctcaccatggccgacaacatcatgacattccgtacggtggtcaaggagatttccttggagcgtggcattcacgccagcttcatgcccaagcccctggccgacgcgcccggttccggcatgcacacgcacctgagcctgttcgaaggcgattccaacgccttctacgaggccggtcaggagttcaacatgtccctgaccgcccgccagttcgccgccggcatcctgtaccatgcggccgaaatctgcgcggtcaccgaccagtacgtcaactcgtacaagcgcctgtggggcggtaacgaggcaccaagctacatctgctggggccacaacaaccgttccgcgctgctgcgtatcccgcagtacaagccgggcaagggcaactccgcgcgcatggagttccgtgcgctcgacccggtggccaacccataccttgcctactcggtgctgctggccgccggtctcgacggtatcgataagcagatgcagttgggcgagcctaccagtgatgacgtgtgggagctcaccgacggcgaacgtcaggctatgggcattcagccgctgccgcgctcgctggacgaggcgctgaagatcatggagaaatccgacttcgtggccgacgtgctcggcgaacacgccttcggctacttcctggacaacaagcaccaggaatgggaggagtacaaccagcaggtcacgccttacgagctgaagaagtatctgccgaagctgtaatcgcaagcgttgcacatgtgccaaaccccgtcgatgattggtcatcggcggggttttctatggcgtgtcgtggtggtgggtagcgggcagaggcgggaataacgttgtcgctgagttgatacgaaaaaacgattgacgtaaccgacgaatcagcttgtagtacgagcgagagcactcaagagagcactcaagagagcacccaagagagcacccatgacgaacgcacctgcgaacaccgcgcgtaccggccggcacttgggtggccgatacctttggttggcgtgtcacctttgccttggtctcggtgctcaccgccgtgctgatggcatcgatggcagtgtctctgccacgcaactcgcatccggcgaagatcggtttcctgaggcaattccgcctgttcttcgaccgccgcatccagctcggcgtggcggatgtggtcttcggcgcagccgcctcctatgtcttctacacgtatctttcgccgatcatgcgcgacgaaatcggcgtgcccgaacgctatatcagcatcggcttggtgatttacggctgcgcctgcctgtggagcaacctgtacggcggcaagctggccgacaaaggtcatggcgtggaaccattgacccacattcgaccgatctactgcgtgcaggccgtctgcctgtgtctgctggctttcgcctcgctgctggcggttggcgccacgaccctgctgcgtccatacgtcgaacgctgacagtgttggccgagtccaatcggacaagaccggtcagctgccgttatcagcttcgcggcgaaccgaaccagctggtgtagataagcgcgaagttgcggttgccataactggagcaggaatcgccggtaccgttgccagcggccagtgcggcgatgttcggctggtagggcgtatagatgtagagcagggcggtcgccttgttctcgatatacacttgtgcgccgccgcatgccgcgttcggatgatattggatgtagttgagattgtgcgccgtatacccgtactgttcctcgtgctcgagatagtaacggtaccgcttggccgcgccatacacctgccgaaagaatccggcataggcgggatcgcagtcggcggtatccggacagttcaaccccatcgccgccataagctgatagtcgctgggatcgacggcagtgaccagatgctgctccttctgcatcacggtgagcagcactttctggctcaccttgcaggcgcgggccgactggtcgatgattgccgccgccgactcgcctttggtgcctgtatagtccgcgcacaggccttcgcctgactcgttcgatgtgtcgaaggtcatcgcggccagcgagccaccttgtgtgtccaaaaacgattggacttcggcctgactcatcgccgaaccgttgaagaactgaccatccgaaataatattgcccggattgaaatcgtatgttcgcgtcagttccagctgtgccgcctcggctgcgcgaacctgtgcccgccagtttgtgaaacgaaccagcccggccaccagcgctacgacaacgaccaccgccaccgtgggaatcagcaccatcttgatacgggtcggccagttcgccttacgccaggaacgcttcagagcattgatcggaccgtgcctacgattgcgtttcctgttccgattgccgaggcgtccgcgcacttgcccacgctgtgatgacggcttgcgcgtgcgctggcgcgtggcctggcgacttgtttgccgtccggtcacgccagcgctttcttgatacggttgagcgaagccggccccttggtgccaagctcctgcgcccatagggacacgtagaactcttcaagcatccaacgggcctgttcggcctgcttcatcaatgcctcatgcttcgggccggccggctccgccttggcacgggccaacgccttatcaaccacctgacgggcctcgtcggcctgccaagcccacttgacatcacggttcttatcggttttcgccttattgagtcggctcagatcggctctcaaatatcggctcaacgacttcagcgcatccgggggagtgcgcccgatgaatccggggtagacgagcgtggcgatatggtcgcgaatcgactgcaacaccgaaagcatcggcagatcagccttgccgccagtggccttgtcgacctcggcataagccttgagcacggcgatcacgtcatgcgccacctgatagacggtgtcctcgtacacttcgcgcacatcgagcaccgcattggctaacgcctcatcgtccgagagcctgtcgacattcggcatcagccgtttgaccgtggccagctgcaggtcttcgaccagatccttggtggacttgtacggagcagaagccagcatcaacgcctcggtacccagccagcgcgacgagatgcgttcggccggcaatcgcaacgcatccaatgcgccacgccagagcatcgtggcccgggactcggtggtggcacccgccttatgcaacaggttcgcctgactgaccagcttgccctgttctccagcctgatcggcctgcttcttgaccatttgacgggccgacgcctccgcctgcgcggcgaacttgcgttgcagcgccttcagatccttggacacacccagcaccttgatggggccgcgcgcatgccggcgtccacgagggtgcttgccggccggcagttgctgctccaccgagaacgtgactctgagatacggggaaagacgctcgaccagttccggccccaacacttcgggatgaatctgcgcacccttggtggcgatggccgccttggtgaacacatgtgccagatcgggccagccaacggtcgtgccatcctcatccaccggcggcagattcggcttctgctgcgagcccgagcccggcagatccgggtaatgctcgtcgatccagtcacgaatcgcacgcgcggcatccggggccggcacgaactggacgcgcagctgcttgggcagcgccttgatcatcgacaggatcagctcatccaacagacccggcacattccatgtgaactggtcgggcgtgatacgcgagagcgccttcaacggcacatgcacggtgacgccgtcggccgggtcggccggatcgtacacgtagctcagacgcaggtcgatgggttggccgtccgatccggtcgtatgccaatggtcggggtaatcgtccagactcaccgaatcgctggatgccagacgctccaccttggccgggtcgaaatcaagcagattcggctgacggtcatgctcggacttccaccatttcgccagatcggccacgctggtcacatcgttgggaatgaccgcgttgtagaagtcgaacagatcctcgtcggacacggtatccgccagctggcgggtgcggctcgcatcatcggcggcatcctcgagaatgtcgcggtttttgcccacgaagtcgtcgtaactgaaacgctgctgaatatcgccctcgaccagaccctggcgaatcaggaagtcgcgcgcctcaagtggattgatgcgtccccactgcacggcacggtcctgtacgatcggcagaccatacagcagcacgcgcgcggtggccacagccgagccacgcgaacccgaccagtgcggctccgcatacgtggtgcgggtcaattggccggccaacggttcggcccacgcggggtcgatggccgccgaatagcgggcccacaggcgagaggtttccaccagttcggtgctcatcacccatgacggggtcttcttggccacggcggaagcggggaacagggcgaaacgggtgccgcgtgcgccctgataatcgttcttcgactgcttctgggcgcgtttcatcgcacgggcgcgcgccgaaccggtcagccccgcgaaatcggaggccttgggctcgcgcaccacctgcatgcccatcatcgacagcaatccggcgagcatcgacttgtggatgccgtccgcatcccacgcgcagcacagcgaatgcgcggcctgctgattcaacggcagctggcggatctccaagcctgggcgggaggcgggcagcgggtcgccgaccttgaacttcagctccttgcacatctggcgtagttgggagacgagatctttccactggcgcatcctcagccagctgaaatactcggttttgcagatacggcgcagcgcgttgttgctcgggtcgccgtctgcttggaacacgcggtcccagatattcagggccgtcaggaagtcggaggtctcatccgcataccggttgtggatgcggtcggcatcctcacgcttgtcgtccgggcgttcacgtgggtcctgcaagctcaggaacgccacgaccacgagcacctgggccagaagattcggcgaaccggttttcgcggcctcgataaccatacgtcccagacgcacgtcgatggggatgcgcgccagctgacgaccggtatgggtgagcgtcacctcgccgcgcttgcggccgatggccttgagctcggtgagctcattgaaaccgtccgacacggccttcatatccggcggatcgatgaacccgaagttcgtgacgtcctcggccgtgcgggccacgcccaccgacagcatgtggagtaccacggcacccagcgaggtacgcaggatttccggctcggtgaagcgcggacgggtctcgtaatcctcacgcgaatacaggcggatcgcgatgccgtcggccacacggccgcatcggccggacctctggtcggcactggcctggctgatcggctcgatcggcagacgctgaacctttgcggtcttcgaataccgggagatacgggcggaaccggggtccaccacataccggataccgggcacggtcagcgaggtctcagccacattggtggcaatgacgatgcgctggtgaaggtgcgattcaaacaccttatgctggtcggcggcggacagtcgcgcgaacagcggcatgatctcgatggcatccggccggcgcatgtcgtcggcgcgcgggccgtaatgatgccgcagtgcggcctcgaactcgtggatgtcgcgctcgccggaggcgaagaccagaatatcgcggggaccgcgctcgtgggaggagtgaatcaccagctcggcgcaggctcgagccacggcggtaggcatatcggtgatgccgtcatcggcataggaggcaccggaccggccgcggggccggtcggaatcggattccgcgatggcgctggccagctcgtcgtaatcggcgtcgccggggcgggcgcccaccgcgaatcccggcacttcgcgcatcaacgcgggcgcggtgccaagcggctcgtagaccacctgcacggggaaggtgcggccggaaacctcgattaccggcaccttctcatgcaaggcgtgctcgaaatgctcctggaacttgaccgaatcgatggtcgcggaggtaatgatgagcttcagatcgcggcgctgaggcagcagtgccgtcagatagccgagcagaaagtcgatgttaagactgcgctcatgcgcctcgtcgatgatgatcgtatcgtatcgggtgagtttcggatcgcgctggatctgggcgagcagaataccgtcggtcacgaccctcaatcgtgtgccgggcgagctttcgtcggtgaaacgcacctgatagccgacctcgtcaccgagcttcacgcccatctccgaggcgatacgttcggccaccgtgcgtgcggcgatacggcgaggctgggtgtgcacgatctgcttgccgtgcgtgccacggccaagctcaagcaggattttcggcagctgtgtggttttgcccgaaccggtctggccggacacaataacgacttgggaacgtttgaccgcgctggctatctcatcacgcgcggcagatacgggaagttctgcgggatactcatatttcatgacgaacttcaatgatacggaagcccttggagctcgcgtatttgctcgcagtgaacccctcgccgagcgcatcgtccagccaggggatcagcgaatcggaaccgagattcttctgcactacgagataggcggcaccgcccaccttgagcttcggcagccaagccataagcaatgtatgcagcgcttccttgccgactcggatcggtgggttcgaccaaatcacatcaaacgtgaggtcgctcggcaccgtctcgcagaacgccggctggttctcggcaggcaggggagtgctggactcgtccacctgagccgtatgaatgttcgtgtggccgttcgcctgtgcgttggcatgggtcaggtccaccgcgcgctcgttgacatccaccgcccacacgttcgcttcgggcgactcaaacgccaatgtcagggcgatagggccccagccgcagcccaaatccagaaaatcgccggtaagcggcggctcgggcgcatgcttcagcaataccgacgtaccgaggtccacgcgcgagccggagaacacgccgttcgacacctgagcggtcgcctcatggccgcgcaacgttacgttcaatgtgcggcgcacatccttcgatgcgggttccgcagagaaatactgttctgccatggtcgctccatttctgcgggattcgccgctctcgtatgccgacctgtatcagccggcctatgccggtacgtgccgatctatgccagcatgtcacctcatgtgatgataataaaggaccatagaagaatcgtgaaccattccaaccaaacgaggcgcacttgaccgacaacacccagtacaccgacatcaaccgcggcaacaacgacgttacccctgaaggtgtgctggccgagcagtccgaagtgttgctcgacgacagccagcgcgcgaccggctggcatgaggacgccaaccaggaatgggaggagcgcgaggcccgcaacgagctcaagcatgtcgccggtctcggcgagctgcaggacgtcaccgaagtcgaataccgcaaggtgcgtctggaacgtgtggtgctcgtcggcgtctggtcgtccgccgtcaccacgcaagccaaggccgaggaatcattgagagagttggcggcgctcgccgaaaccgccggtgcggtggtatgcgatggtttgctgcagcatcgctccaagccggatgcagccacgtacgttggttccggcaaagccaaggagattgccggcatcgtggcgcgtgaggaagccgatacgattatcgtggacgacgacctgccgccgtcacagcgccgtgcattggaggacgccgccaaagtcaaggtggtggatcgcaccgcggtgattctggacatcttcgcccagcacgccacctcgcgtgaaggtaaggcgcaggtggagttggcgcagctcgaatacatgctgccccgactgcgtggttggggtggttcgctgtcccgtcaggccggcggtcgcgcggccggcgcggatgcgggcatcggatcgcgaggcccgggcgagaccaaaatcgaaatggaccgtcgtgtaattcgcacgcgtatcgccagactgcgccgtcagattcgtgagatggccccggcacgtgaggtcaagcgcggttcacgccgtcgcttcggcctgcccacagtggccgtggtcggctacacgaacgccggcaaatcctcgttgaccaaccgtctgaccggttcggccgaactggtggaaaacgcgctgttcgccacattggacacggccgtgcgccgcgccaaaacccgcgacggacgcgcttacgcctacgtggacacggtcggcttcgtgcgccgcctgcccacccagctggtcgaggcgttcaaatccaccctggaagaggtggccgaggccgacgtgatcctgcatgtggtcgatggctcccaccctgacccgttctctcaggtcgacgcggtcaatgacgtgttggcggacatcgaaggcacggcctcgattccgcgtattctcgtattcaacaaggccgatcaggcggacgaggcgactcgtgaacgactcgccgcgctgcagccagatgcgttcatcgtctccgcctataccggtgagggattggacgagctgcgtaccgcggtcgaaagtctgctgccggtcccgcatgtgcatgtcaacgctctgctgccgtatgccgctggctccctgatctctcgtgtacgcgaatacggcaaggtagacaaggtggagtaccgcgatgatggcatacagcttgaagcggacgttgacgcccatcttgccgctcaggtggtcgaacagtccattgactaacgtgataaacatcacagtatattcgtgagcgctaacaaccgttgaaaacattaccatacggttatcaaacagggtggtgtgctggtagcaaaacgtcttagcgggtttatagagtgaagacgttagttacaaggcctgccattcatcagcagaccgcctttgaagagaggttcatccatcatggcggaaactaccgttaagcccacgaagcttgctgttattggtgccggtgccgttggctccaccctcgccttcgccgctgcccagcgtggcatcgctcgcgagatcgtgcttgaagacatcgccaaggagcgcgtggaagccgaagtgctcgacatgcagcatggctccagcttctacccgaccgtgtccatcgacggttccgacgatcctgagatctgccgcgacgccgacatggtcgtcatcaccgctggtccgcgtcagaagccgggtcagtctcgtcttgagctcgttggcgctaccgtcaacatcctcaaggccatcatgccgaacctggtcaaggtggctccgaacgccatctacatgctcatcaccaacccggtcgacatcgctacccacgtggctcagaagctcaccggtctgcccgagaaccagatcttcggttccggcaccaacctggactccgctcgtctgcgcttcctgattgcccagcagaccggcgtcaacgtcaagaacgtgcacgcctacatcgccggcgagcacggcgactccgaagtcccgctgtgggagtccgccaccatcggtggcgtccccatgtgcgactggaccccgctgcccggccacgatccgctcgacgccgacaagcgcgaggagatccaccaggaagtcaagaacgccgcttacaagatcatcaacggtaagggtgccaccaactacgccatcggcatgtccggcgtcgacatcatcgaagccgtcctgcacgacaccaaccgcatcctgcccgtgagctccatgctcaaggacttccacggcatctccgacatctgcatgtccgtgccgaccctcctcaaccgtcagggcgtcaacaacaccatcaacaccccggtctccgacaaggagctcgccgctctgaagcgctctgccgagacgctgaaggaaaccgccgcccagttcggcttctgataaaaaatcgctgtacggagcgcctttcgcaccgcacaagactcgacctacctttgtaggccttcaacttgtgcggcacgaaaatcgcacacgtacagcgattttttataccctgctgaatgctcccgttgggagcattttttattcgtggatttcgttggaggagggggagctatagccctcgggctcgagctggaaggtggtgtgggggaccgagaccgggaagtgctcgcgcaggcaatcctgcagttgggtgaggattgtggcggcatcttccatggtgaggtctttgtcaactaccacgtgggccatcagaatcggcatgccggtggacaccgtgctggcgtggaggtcatgcacggcaagcacatgcggcacgtcttccagatgttcgcgtaccttatcgaggtcaagtccatccggtgtttcctccagcagcaccttgaccgcgttgtgcagcaacttgatggcgcgcggaatcatcatcagtgcgatgacggcaccggccacggcgtcgaagccattccatccggtggggatcattaccagggcagaggccaccacggccaccgagccaagtgcgtcattcatcacctcgaggaacgcggccttcatattcatgttgtcttcgcgctgcgaggcaaggatgaaaatcgagatgatatttgcggcaagacccagaatgcccgcgaacagcagcaagccgatatcgtcgatttccgctttggaactgccgaacagacgcatgccggcctccaccaacgcatagatgccaacgatgagcagcaccacggcacctgcggcagcggtgagcacctcaagcctggcccagccccaagtacgagtgttgctgggcttgcggcgcatcagtatggcggtgattgtggatgccgccagcacggacatgtcggtgagcatatgaccggcatccaccagcagggccaatgagccggttaagacagccgacaccacttcgatgaggaagaccgaaccggttacggtcaacgtggcaatcagcctacgctggtgcgcggcagggtttacggatgtggatggtgcgggtgcatgggtatgagccatatgtactccttcgctctatcgagttgaaaccgcttctcatttccatttgcgatatggtctgaatacgacgaaaccccggcgcgaggccggggtttcgtaagctgtgcgtgactatagcacgaccagcgcgattcggtgcacgctgatcagctggtggcgaacaggctacaatttgcgcagcacggtgaccaccttgcccataatcgtggcatgtgtgccgtcgatgggcgagtatgcggggttgtgcggcatcagccagacatggccgttttccttgcggaaggtcttcaccgtggcctcgtcgtccagcagagcggcgacgatatctccgttgacggcggaattctgttcgcgcaccaccacatagtcgccatcgcagatagcggcatccaccatggaatcgccgtggacttccagcatgaacagggtgccggagccggtcagccgttccggcagacgcatgacgtcgtccacatgctgttcggcggtaattggcacgccggcggcaatacggccaacgagcggcacatcgtgtgattcggcaatggcttcggcggggaattggtatatctccgccacattactggtgctggttgcctcttcgctggcttgggagggcttttcggcattcggggcggatcctgccaccacctcgatggctcgacccttgttcgcgttcatgcggatgaagcccttgtcttccaaaacttgtagctgatgcttgaccgaagacggacttttgagcccggcggcatttccgatttcccggaaagagggggcgaagccttgttcgtcgatatgcgtgcgaatggcgtccaacactttgcgctggcggtcggtcagggtggactcgtccggcttctgcttgggggagaagggaatggtgctcacgtcagggctcctttcgttacgtcaccagcataacgtgttgttcgtgtgaaatcaaacatctgttcgagtttcgacttgaccgtgtcgaacgtttgtgccattataagaacagttgttcgatagaacatctgttcgagagaggtggtcgtgatgactggttcaatggtgatggccccggcccgtagcgcacgtgtagctatgcagcatgctggaacgttccaccggaatgtgcgtgggaagattatcgcagtgatggtcgccttggcgctggcctggtgtggtttcggcgcgcttaccgctcagcgggcccaatcggatacgggggccacgcaggtgaccagttatatcgtgcggccgggggatacgctctggtcatatgcttcggctatcacgcctgctggtcatgatgtatcggaaacggtggatgagctgattgcgttgaacaatcttgagtccggatcattgcaggccgggcagcgcattattgttccggttgagtaaatgaaacccgagcggcatggtttttccgcccgtacacgttattctggggagcatgcattgtcctttttgccagaaccccgacaccaaagtcattgatacgcgcattagcgatgacggtcattccatccgtcggcgtcgcgtatgcccgaaatgcagcaagcgttttaccacggtggaaaccagtatgctgctggtcactaaacgttcgggtggcgtggagccattcagtagagacaaagtgatttccggcgtacgcaaagcttgtcaggggcggccggtcagagaagaggatctgaagctgctgggacagaaagtcgaagaggatcttcgctcccgaggccttgccgaagtcacctcagatgaagtgggcaaagccatcctgaaaccgttgcgtgacttggatgtggtggcgtaccttcgattcgcgagtgtgtaccagaactttgcaggtctggaggatttccaaagcgccattgatggtttgcgtgaataatatgcgaatgccatgcaccgtgatatgcgagtgattcgcaaaccatggtgcgagccaatcatgaagcccagcacttatgaaagagacccgtcatgatgacgggtctctttcatatcaatcgaggatgagctgcgtcagctgatgacacgcatgcgaatggtgccttcgatgttgcgcagtgcttcaagcgtggcggcgctgggcgtctgagccacgtcggtgaccacatagccaagttcgccctcggttgccagcgactggaaggaaacgttgatgttctcctcgccgagcacatgattgacatgagccagcacaccaggaagattgtcgtgcagatgggcgatacggcacacacccttgcactcaccgaggttgatctgtggtaggttcacggacaaggaggtagaacccttgaaccagtaatcctcaagacgctgagagacgaaatggccgatggattcctgagcttccaaggtggagccgccaatatgaggagtcagaatcatattgtcttcattggccagtgaggtctcgaacggatctccgctcttcttcggttcaacggggaacacgtcgaccgccgcgccagacagatggccggaatcgaggtgctgcttcagagctcccagatcggcgacgaaaccgcgcgaaaggttaatgaaaatcgcgtcctgcttcatgtgggcgaattggtcttcgccgaagaatccggtgttcgacttgcggccatccacgtgcagggtcacggcatcggactgttccagcagttcgttgagggtgtcgcaacggtgggcattgcccagtgccagtttctcctcaatgtcgtagaacaccacgcgcatgccgagggcctcggccagtaccgacagctgggagccgatgttgccgtagccgatgatgccgagggtcttgcctcgcacttcatgcgagccggaagcggacttgtcccacaggccatgcttgatgtgatgcgtgtgtgcgggaatgcggcgcatcaagcagatgatgtcgcagatcaccaattccaccacggaacgggtgttggagtagggagcgttgaacacggcgatgccacgcttgccggcatgtgccagatcgacctgattggtgccgatgcagaagcagccgatggcgcttagcgtaggacgcgcatccagcacgcgggctgtgacgttggtcttggagcgtacgcccaccaagtccacgccatccagcgcatcgatgagttcgtcctcgctcagggctcccttcatggtctcgacttcgaaaccgtgatcacgcagcgatttggccgcatcggggtgaatgttttccaataacagtgctttgggcatgcttcataccttagatgttcagggacttttcgtccgcttttgtccgaactataaccagtttctgggtcggcctggtcattgccacgtacaggtccgaggcggcgaccaggcggctcggcgcgtcatcctcgatgagaccgggctcgaccaccacgacggcatcgaactccagacccttgaccgtttcagtgccgcagacgctgatttgctcatcccattcgggctgctcgatgagccttgcgtattcggccgggtcaagaatgacagccagtttgcggcgcacggcatcgcgcaccggggcgatgagattatccggacagatgacggcgatgcggccggtgccgtctgccgaaacgaattgttcggcaagctgcgccgcctgctcggccgtcgtttccagcaaggacgacatgtcgggcaccacattgcgggacaccgaatcggggatggtgcgcaccgcattgaccgtggagatgtagaggccttcctcctcggcaaatcgtgaggcaagttcggaaacttcctgcggattacggtagttgatggtcaactcgttcaaatcccagtggctttcgccgaacaggcggttcatcgatttgctccagcgtcgggtgccacccagcgccgaagtctgcgccacatcgcccacgatggtgaacgagcgggaggggcaacggcggatcaacatacgccagtccatggcggtcaattcctgcgcttcatcgaccacgatgtgcccgtaggtccattcacggtcggccgcggcccgctgcgcggtcagctcagcgtcgtccccgttcatctggtcgagcagcatctgactggagacgatgcctccacccagaccggtcgcggccagagtgtctttggcatactgctcttcggcggcacgacgtgcgtcggcggcggactggcgggccaccgccttgggatcggggcccagcatatccattgcttcgtcgagcagcggaatatcggagcgggtcaacggggagcctttggggcgggcaagtgccgcgatgtcgttgtcggtcagccaaccagccagagacttcagacgttcgggatgggcgaacagctgatcgatgagccatggggcggtcatcggcagccagcacaggttcagggtcttgcgaacctgctcgttcatacgtagcagcgacatcgcgcggttcagctccgcctgatccggcgtgtaatcaagctgttcggcataacggttctgcatgctggtcagcatcgaacggataaaggtctcgcgggccttgttatgaggttgtcgggtgcgcttcgcgtccgcctgcgcctgctcgatatcagtggccagcattggtacctgaatgccgctaatggttactgtcggcagagcagcgggaacacgcacgcgtgcggcgatggcattggccactacggaggtcatgcgtcgatcgcccttgagcttggctgcataaggggagtcgaccgccgtggcggtgatgccgggaatcagatcgctgatggtgcgtgagaccacgccggtctcgcccaaggagggtagcacctgatcgatgtagtgcaggaacgccgagctggggccaacaaccagcacgccggaacgttccagcgtgcgccggtgcgtgtacagcaggtaggcggcgcgatggagcgccacggccgtcttgccggtgccggggccgccctgcaccaccacggcgcgattcatgtcggagcggatgatgcggtcctgctcggcctgaatggtggccacgatatcggtcatcttgccggtgcggcgtgagctcaacgaagccagcagcgcaccctcgccggtcaatgtgccggcggaagacgcctggccgacctggtctgaatgcacgtcgagcacctcatcctcaacgcccacgacttcgcggaaactcaaggtgatatgcctgcgcatcacgatgtcgccgtgattggaaggggtcgcctcatagaaaggacgtgcggcttcggcacgccagtcggtcagaatcggctcatggtccgggctcgacaggccgatgcggccgatgtaatgacggtcgccgttcttggcatcgaggcggccaaacaccagccgatcctcaacgctgcgcaattgcgtgaggcggttttcgtacattgtggcaaaggagtctcgttcgctgcgttgcgtgggggatccgtgggagccggcggcgcgtacggtgtccaggcgttgccacatttcggctcgcagatcatccaatcgtccataggcgcgatcgacggcctgctgctcttcatgcagctgggaggcgtaactcgacatgctgttctcttcgttccatttccgtggggcagaaaaacttaaggcattcaaatttaccgcacaccccctacgtcagtgatgcggacaacccggaataggtgaattcagcgtgaattcaccatgctgctcggtcggtggggtgcgcgacgtggattgaatgtgcggagcgtccattcgtgcgacagtcgtggccgacacgcgcaatccatcggtaattgccctaaaagggtgagcaaatcgtgcatgagtggggagaaatggggaatcgtggggtagagtggtgagccagttggccgaagtgtatcccacgtaacgatgaaggaggtggagccatggttgccgatcagacgattcgcgacgctgatgccaacgcacaaggctccaccactatggccgatctcatggctggtctgccgccattgcttctcggaacatatacgccgaagatcgatgccaagggccgtatggcgcttccggccaaattccgctcccagctggggcagggcctggtcatggcccgaggccaggaacggtgcgtgtacctgctgccgttcgacgaatttcgacgtatcgcctcgcagattcagcgtgtgtcggtgggaaacaaagccgcccgcgaatacctgcgtgtgttcctttccggtgccgtcgaccagcagccggacaagcagggccgcgtgctggtgccgcagatgctgcgcgattacgccaatctgggttccgacgtcgtggtgatcggcgttggcacccgtgccgaactgtggaataaggacacgtgggagtcctacctcgccgagaaggaagagggatattccgatattgctgacgatgtgttgccggaggtggaattctgatggttgatgtggcgaatattcatctgccggtattgcttgacgattgcgtgaacctgatggcacctgccctggaacatgagaacgccatcgcagtggattgcaccctgggccttgccggccattccatcgccttcctcaaggccgcgcctcaggctcggctcatcggcattgaccgtgacagtgaagcgctggggctggccaccgaacgtatggaacgggaggggctcgccgatcgattcattccggtgcatgccgccttcgatcagctcgatcaggtgttggcggaccaagacatcgaacgcgtggacgccgtattcatggatctgggattatccagcctgcagatcgacgaaaccgatcgtggcttctcctattcgcatgatgcgccgctggatatgcgcatggacgtcagccagccgttgacggccgaacggattcttgccacctatgatgcggcggaactggtccgcatattcaaggaatacggtgaagagcgtttctcgcgtcagatcgcccgcgccatcgtggcgcgtcgagacaaggagccgtttaccaccaccgcacagctcaaccgtctggtcgatgaagtggtgccgcaagcccaccgcccggcgggcaatcccgccaaacgcgtcttccaggcgttgcgcattgaagtcaacggcgaattggacaagctcgcctccacattgccgcaggccgcgaaccgactgcatgtcgggggacgactggtggtggagtcctatcattcgctcgaagacaaaaccgtcaaatcgttcatggcacaagggctgcgagtggatgttccggctggcctgcctgtcataccgccggatgcccaaccgtttttcacggatctcacgcgaggtgccatcaaggccgacgaacatgaaatcgcagccaacccgagatcggcttcggtgcggttgcgggcggtggaagtcagccgtgagattccgtcacgatggaggaaacgctttacgcaaaccgcgcagggcctgaatgacgtcaagatacaaggctccgcgtctccgggcagagccaaaaacacggcacgaattcgtacaaggaggggataacagcatatggcaactgcacgtagcattcgatcgaacgcggctccagcctcgaaccgaccgcacaccaagcatcagtcctcctcccgacctgagctgcgggtggtctccaacccgcgtggaaacgagcagggcaatgtcgtcggacgggtcatcgaatggaccagaacaagaagcgcaccgctggtgcacgtggccattgcagtgatcttcctcgtcggcaccttgttcggcgcgctgatgctgcgtacccagatggtgcagaactcgtttgaggcggcacagatcgaaaccaacatcaacagacttacccaagatatcgaagacgatcaggccaaactcgatcaattggtcgcgaacctgcccgacaaggccagcgacatgggcatggtcccgcagcagggatcagtgtccatcgacttaagcggataccagtccaacaaaggcggaacccagtgaacaccattcgtcgcatcgtagagttcgccaaggtcaagaccttcgcgttcaaatgcatcgccatcggcgccgcattggcgttggtggcgtcggcatgcgtgattcagctggcctccacccagctcatcggcggccgtcaaaccgcacaagcggccacggctaaccgcaccctgaccgtgacgttgagcgccaaacgtgggcgtatcctcgacgccaacggctccgtgctcgctcaaagcgtggagcgttatactatcgtcgccaatccggaggctgcacaggagttcgagccgattacttgcaatgacaacacccgtgattactgccacgaaattgacggcaaacccgtgggcgctaccggagcggcggccgtgggccgactgctggccaaagtcctggatatgaacgccatggaactgggcgctgatctgtccggtaccgggcagtatgtgattctgaagaaagatgtgactccgcaggtcaagcgcagcatcgaggcgttgcacctgggcggtattgtctggggtgagctgagcagtgaacgactgtatgcggatggcgatctcatgggcgcgctgcttggcggcgtgaacgacaacggcgatggcgtcgccggcatcgagcaggtcgagaacaagacgcttaccggaaccgatggccatgaaacctaccagcgtggtaatggcggcgaagagattcccggcaccatgaccgaatcggtggcggccaaaaatggcgacgatgtcaccctgaccattgaccgtgatgtgcaatggtatgtcaaaaaggtcttgaaggaggccgaatccaagtatggtgcagcgtgggcgatcgccgtggtgcaggatgtccagagcggggagattctcgcactggccgatagcgatgaagtacaggctggtaccgatgcggcgaagatgagcccgtctcgggccgtgtccgaaaccttcgagcctggttcggtgggcaaggtcatctccatgtccggctatctgcagatgggactgcataagatgagcgatcaattgtcggtcccggaccacatcacacaggagggccagacctacaaggactcattcgaccatggcactgagcgctggacgctcgccggcattctgcagaactcatcgaacgtcggcatgattatggccggggagaactatccggatgagcaacgctacgagtacctgaccaaattcggcatcggacaaccgaccggactgaacctgcccggtgaatcgagcggtctgctcaccaacccttcggcgtgggatctgcgtacgcgcaacaccatcctgtttggtcagggctacaccgtcaacgccctgcagctcaacaacgtggtggccaccatcgcgaacaagggtgtcaagcagcagcagtcgatcatcaaatcaaccaccgatgccaatggcaagaccactgagaccaagaagggcgaagccacccgcgtggtggatgaaaaggtcgcatcggacatgatgaatgcgatggaatcagtggcggaaggctacaacaagttcgtcaaggtcgatggttaccgcatggccgccaagtccggtaccgcagaggtgcagggctcggatggcacgctctcgtccattatctccgattattccgtggtgattcccgcggacaacccgcgctatgcggtcaccgtggtgatgaaggatccgaatggtgtgttcggcggtctgacggccggccctgtttccgcacagatttgtgagttccttatgcagaaatacgaggtgcctgtctccagtccacgcaaaaatgctattccagtcacgtggtaaggatcaggggagaaaggcgatagcccatgagtgcagtgagcgaatccatcgcccagcgggtgaccctgggaatgctggtcgaacggtacggttttgaagtcgatccacccttcgccaccaatgtcaccattacctcactcagcgatgccgtggacaccgtgattcccggctcgctgttcatctgcacgcatgagcaggaacccgatgtactgcatgccgcacaggccggtgcctatgcggcgttgctgccacgcgcgtccaaagggcagatcgccaatgccgatataccgttgctctacggcgatttcgacgatcgcgtactcggcgatctggccagcggtctggccggcggaccgtccaatgccatggcggtgttcgcggtgaccggtgcggatgagcaggccgtcgacgcaggcgtgtcccagctctccgaattcctgcacatgctgggcaatccggtggcggtaatcaccgcatccgggtccacgtcgatgacacgtaccatgaacctgaactatcctctgggcatcctcgatatgcagcgcgcgctgtccgtgtgcgccgaagacggtgtggcggccgtgatcatcgccatggatgaccgcacgttggccgagcatgcgttggaatcggtgaacgtggatgtgctgggcacggaggatgtcaacgcaagcgcaagcttgaacgaattgaagacacgctacgcattcgttgcggaacatgacatgtccatgacctcgtcgacacccgaatcggatgaaatggctgcggattcaccggcaatgtatgaccgcgtccgacttgggcacatgtccttggccatcgccatggtacaggccgccggcgtgaggaaaaacaacatacgcagtgccctgcatgtggccaataatttcaattaagtccgtggatacgggacgaagcgtaatcgtaaaggagtttgaaacaccatggttccgatgagcgtggaggagatcgccaaggccgtcgatggtcgattgatcggagacgccggttccgagtctcgagccaccaatacggtcagcgactcgcggcaggccggccccggatcggtgtttgtggccatccgaggcgagcgtgtcgatgggcatgactttgtggcgaaaaccgctggacagggagccacggtggccatcgtcgaccatgaggtgaagtccgatggccttccgcagatcgtagtgaaagacacggtcgacgcccttggcgaactcgcccgatacaacatcgttcgccgccgcgagctggacggcgacttcgatatcatcggattgaccggttcggtgggcaagaccaccaccaaggatctgctctcctccctgcttgccaccgtaggtccgaccgtggctccggtgggatcgttcaacaatgagatcggcctgccgctcactgcgttgcgggtcgatgagcacacccggttcttcgtggctgagatgggtgccagccatatcggcgaaatcgcgcgactgacccgtatcgcaccgccgaacacggcaatcgtattgaaggtcggcgtcgctcaccttggagaattcggctcccgcgaacgcatcgcacaggcgaaaagcgagatcgtgcagggattgcttcccggaggcaccgcggtactgaacgccgatgacgaacacgtggttcccatggccggcctggccaacggcgacgtgctgtggttcggcttgggatcgtcgcaggagcccgaggtgcgggccattgatgtcactgccgaccggtccgatcatgctgaattcacgttggtcgatgcggacggcaaccatacgccggtgcatctgggcattcctggacgtcacaatgtgatgaacgcgttggccgccgcaaccgtggcgatgcgttacggtatggcacccgaaacggtggcacggattctggcctcgcagcacaccatcagccctcatcgcatggcattgtccacggtgaatcgcgaggggacttccttcacgctgatcgatgattccttcaacgccaatcccgactccatgaaagccggcctgaacgggttgaaggcctggaactcaaatgacggcaaggagccgttccgcgtggcgctgctgggtgccatgctggaactcggcgccgatgaaacggcattgcacacctcgatcggcacgtatgcggacgaattgggcatcgacgcgatcatcgcggtcggttccgcccaagaccaacatctcgatgcactggcacaggctctggcggacggtgcccgtcagagccaatccgcgtcggtggattgcgtacacgacatcgatgcggccgaacagctggtcatcgacttggctcgcaaccatcccgacgctgtggtgctgctcaagggatcgcacgcgtcaggcctgagcgctttggctgaacgctgggcaaagaactgacctgataaccaccccaagaaaccgacaagaaagagaagctgcacgtgattgctctgatcattggaatgctggtgtcgctcatcgtcaccttagtcggcaccccgctgctgattcggctggtccacaagctgcactatggccagtacatccgccaggatgggccgcagtcgcatctggtcaagcgcggcacccccacgttgggcggcgtggtcatcaacttcgcgattctgctcggttgggcatcctccgcactgtaccgatacctgcgttcgggcgacgtgccctcctggtccgcggcgctcgtactgttcgccatgctgtcgatgggtttgctgggctttatcgacgacttcgccaaggtgcgtaagaagcagaacgaaggcctatcggtgggcggcaagttcatcggccagttcatcttcgccaccatctacgcggtacttgcgctgctgattcccaccaaatcgggattccccagtgcgcaggcaggcatcagcttcatcgaacagccgttcttcaacttcgacttcgccggccgtgccgtagccatcatcctgttcgtcatctgggtgaacttcctgatgaccgcatggaccaacgcagtgaatttgacggatggacttgacggtctggcggcaggttcgtcgatgatcgccttcactggttttggcatcatcgcattctgggaaagctaccacatcaagggcggcagccatggcggatattcctatgccgtgtccgatcctctcgatctgaccgtcatcgccgtatgcgcggccgtcgcctgcttcggcttcctgtggtacaactcgaaccccgcatcgattttcatgggtgataccggttccctggccttgggtggtctgttcgcagccctgtccatcgccacgcacaccgaattcctggcggtggttctgggcggactgtacgtcatggaagccatgagcgacgtcatccaggtcgggtacttcaagatgacccacaaacgtgtattcaaaatggcgccgattcaccatcatttcgaactggagggttggaccgaaaccaaggtggtggtgcggttctggatgatcgaactcatcttcgtgctgctcgccctgacgattttctacggcgactgggtcacccgctccggcctgctgttcagctagcggaaatctgggtggattatgctcacccacggaattcctatatcaggaggaacaatgcaagtagcggataagacagtggtgatcgccggactgggggtgtccggcacctcgttggcggaggtattgagggaacgcggcacccacgtgattggcgtcgacgagaggaagcccgaggccgatctccactcctttgatgacgtggactgggaccacgtggactacgtcatgtcgtccccggtgttcaacccccgcaccccgttcgtgctggaagcccaacgccgtggcatccccgtgatgagcgaggtggaattcgcatggcagctgcgtgtgaataacgagcgcaccggtactccggctccatggatcggcatcaccggcaccaacggcaaaacctccaccaccgagatgacctcggaaatgctcaccgcctgcggactcgacgcgccgaccgccggcaatatcgcctccggagacatgagcatgagcctgtctcgttgcgccaccaatccgcagcacgacgtactgtgcgtggaactgagctccttccaattgcacttcaccgattcgctggcacttgactgcgcggcgatcaccaatatcgccgacgatcacctcgactggcatggcgggcgcgagaattacgccgccgacaaatccaaggtgttccacaacgccaaacgcgccatcgtctacaatgcgcaggacgccaaagtcagcgaactggcggccgaggctcagactgccgaaggatgccgcaaggtgggattcacgctcgaggcccctcaagccggccagatcggcattgaagatggctggatcgtggacaggagcggcgtggccggcggcgcagtaggagagtcggtcagactggccgccatcaccgatttcacgcatctggcagagccggacggctcactgtacccgcatctggtggccgatgtattgacggcattggcgttggtgctgggacttggcgctgatcgcgataccgcgttgaaggcgcttacctcgttcaagccgggcggccatcgcatcgaaaccgtggctgaggccgcagtcgagggcggctctgttcgttttgtggacgattccaaagccaccaacggtcatgcggcacgcgcctcgctgtccagcttcccggccaagtctgtgatctggatcgccggaggtctggccaaaggcagtcgattcgaggacctggtcaaggaccaggcacacaccatcaaagcggccgtcatcatcggcaaagaccagcagccgatgatcgaagcgtttgccagccaagctccggacatcccggtgaccatcatcgatcccgaagacaacgataccgtcatggaccgtgccgtcgaagcctgcggcacgtatgccgccgccggcgacatcgtgcttatggctccggcctgcgcctccatggaccagttcaagtcctatgcggatcgaggcaatcgattcgccgccgcagccaagacgtggagcgaggtgcatggcctccactgatacccataagcgtaaggcatacagagcccctgacaagccctcactcgaaatcgccgactacacgggttggcgaagcttgctcaacccgctatggtgctaccacggcttccgcatggccgtggtggggctgacatgcttcggcctgatcatggtgttctccagctccacggtcaccatggccgcactgggcaagtcgccgttccttcagcttctgaaccagggcgcgttttgcctgatcggcttggtgctgggcttcgtggcattgatgatgccggtgacgttctggaaacggaccggcgtgttctttgtggtgggtgcctgcctgttgcaggcgctgacctttactcctttgggtcacgacgtctacggcaacagaggttggctggacctcggcttcaccactatccagccggccgaattcatgaagttcgcgatgtgcatatggctgccctcgtcgttgcatgcctgcagcaagatgtaccacaagaagggaatcaaagcatatgccgcgccgttggtgttgtatgcgataggcgtggcgctggtgatgggcggcagggacctcggcacggccatgattctggtcttcatcggaggcgtggcctttctgatcgtcgggttccccggcaaatggatgggagtcggcgtattgggcgcggtggttatggtcggtgcattggcggtttccagcccgaaccgcttgcgtcgtattctggccacatatggcgattgctcggccgctgacgcgcagagcgtatgctaccagtccattcacgccaagtacgccatcgcctccggaggttttctgggattgggcatcggcaattcgcgggagaaatggaactacctgccggccgcccataacgatttcattttcgcgatcatcggcgaggagaccggattcgtcggttgcgccatcgtattgctgttcttcgcgattctcgcctggtgcatgatcgtcatcgcattgcaggtcaccgatcgttatgttgccatggtgctgatgtgcgtcgccatttggatcgtgggccaggccatggtcaacatcggcgtggtcgtgggtgtgttcccggtattgggcgtgcctatgccgttcgtctccgcaggtggctcatccatgattatgtgcttgacggcggccggactggttgtgggacttatgcgctctcaaccgcagataaaacagtcgcgtcagagtgcgtaagtagactcggtaatcatgaatcaaggcacaccacatatcgttcttgctggcggcggtaccgccggacatgtcaatccgctgctcgcggtcgccggggcgattcgcgacatcgaacccacggcacaggtcaccgtcatcggcactgcggtgggtttggagaaggatttggtgccggaggccggctacgagctcgacaccatcgaaaaagtgccgttcccgcgtcgccctaacctgtacatgctgcgcttcccggcaaaatggaagcgagaaaccgccaaggtgcgctccattcttgaaacgcggcatgcggatgtcgtggccggattcggcgggtatgcttccgcccccgtctacgccaccgcacacaagatgggcattccgattgccatccatgagcagaatgcgcgtgccggcatggccaataaactgggcgctcgttgggccgatttcatcggtaccgtgtacgagggcaccggtctcaaaccgcgtgccggagccgacgtcgagcgcgtcggtctgccgttgcgcccggccatcgcctccctgaccaaacgcatcggtgacgaccgtgccgccgtacgccgtgaatcggccgcgcagcttggcgtcgatccgaaccgtccgctggtgctggtcactggcggatcgctgggagcgcaaagcctgaaccgcgccatcgcctcctccgccgcagacctgttggcccacgcacaaatcatccacttgaccgggcgaggcaaaatcagcgaagtacgcgaactggtcacggcctcggccggcgcggacgtgcttaccggcatcggccccgaatcggccggacaaggtgactaccataccgccgaatatctggaacgaatcgatctggcctttgcctgtgccgacttggtgatttgccgtgccggagccggatcggtatccgagctggctgcactgggcctgccggccatttacgtgccgctgcccatcggcaacggcgagcagcgtttcaacgccgagccagtggtgaacgccggcggcggccttctggtcgcagacaaggacctgaccccgcagtgggtgcatgagcatgtgcccgatctgctcgccgatcacgaacgacttgccgaattcggccgcaaggcatgggaatacggcatcagaaacgctgccgaaatcatggcccggcacgttctgcaattagccgaaccatccaagtagtattcagatatcattccgtgcgcgatactgaccaattccgttccgcagcacgagatacggtcataatatagggtgctggaatccctaaaggagttttgaattgtctcaagatcagcccatagtgcttgaccctacgtatgcctcattcgatgctgcggcccgccctgcggatctcggcgccacccatttcatcggtatcggcggtgccggtatgagcgttctggccgaaatgctgcacgccgaaggagtcgcggtggacggctccgatcgcgcacacagcgccaaaaccgaccgacttgaaacgctgggcatcaccgttgaattcgggcagcgagccgaaaatgtcgcccaggccgagaccgtggtctactccagcgccatcaaaccggacaatccggaaatcgtcgcagcacacgcggcgggcaagcgcattgtgcatcgcagtgacatcctcgccctgctcatgaacggcaaacgagccgtcaccgtggccggagcgcacggcaaaaccaccaccagctccatgctgtcccacattctggtgaacgccggtgccgatccaagctacgccatcggcggctttatccaaggcccggacggcaccacgctggacggcggacacgcgggcaaaggcgacatcctggtggccgaagccgacgaatcggacggcagcttcgccaaataccatccgaccatcgccattatcaccaactgtgaagccgatcatctcgaccattacggcgacgaagcccactaccgtgccgcgttcgttgcccacgccggccgggccaccggtcacgtgatcatcagtatcgacgaccccgacggacttgccgtgctggaggccctgcccgccgacgtgaaatcccataccgttgcctacggcactaccgcgcgtgaatccctgcccgatttgggcggtgccgcgtatgtctggatcgcttcggaaagcgagaccgctggcagcggcgtcgaacagctcaccctgcatctgccggccgcggtgacggcgggggagccggtgtctcagagcgttgccctgaaggttcctggcgtgcacaatgcgcgcaatgcggccgccgccatcagcgctgccgtgctgctgggcgtgagccccgcagacgcggccaaggcggccggcacattcctcggtgcggcacgccgcttccaggtgcgcggcacggtcaagcaggtcactgtagtggacgattacgcccatcatcccaccgaaatcgcggccctgctggatgcggcccgacgccggtaccccgattcgaccattcgtgtgatcttccagccacacctgttctcccgcaccaagttcttcgcgcaccagttcgccaaatccttagccaaagccgatgacgtcattatcaccggcatcttcccggcccgtgaaaagcaggccgatttcccggacatcagcccctccaccatcgtggacgcggctgcgggactcaaagatgcttccgcaggcacgtggattcagccggttgaggatatgtgcctggccgccaagatgatggccatgcgcgcccaccacggcgacgtgatcttcaccgtgggcgcgggcgacatcaccgacatggatcaggtgctgctcaccgcacttgaggcccatcgggaaagctgcgagtgatgtccgggcgcacggtcagatccgggggcaatgacaacggctcacgtcgttcgtccggaagtccccgcaagccgcgcaccatcggttcacgcggaaacacgggtcactcgtcgaagtctcgcgctccccggtccgtgtcttccgggcatgagatcgacgagccggagatcatcgacgatgtgacggtagccaagggccaggctggtgccttcgtcgatgcacgacggttgcgcagcgaggattacgttgccgaaacgctgcaccagaccaccggctccctaggagtcgtatcacgcccgaaagtggtgaatttcaccgaacgcgccaaagaacgcaagcgtgcgaacgtacgtgtcgttgcgttacgcgtgttgattgctgtcgtcagcgtggctgtagtgacggggctaacgtggctgctgctcttctcgtcggtgtttcgtctggaaaccagcgagatcggcgtatccggtgccaacgaatgggtgagcgcgcagaccatccatgccatcgccgataagcaggctggaaagtcgttgttcctggtctccacccatgaggtcacagagcaactcaagtccattcccggcgtcagcgaggccaaggtctccaaacagttccccaagtcgatgagcgtggaagtcaaggcgcaacggcctgcggccatgctgaaaagaggcgataccctgaccgcggtggattcccaggcgcgtgtgttgaactcggtgaagaacgccaacgtggatggcattccggtgatcgaggtcaaggatatagacgccagtctcaagaaccgttcggtgaaggaggcgctgacgattctgggcgcattgccggaatcgatgcgtaagtccattaccaaggtcaccgctgagacgcaggattcggtgaccaccacgcttaacgatggtgaccgcgtaatcatttggggagactcctcgcaactgaagctgaagctggcggaagtcgaggaaatcgacaagaacatcaccgctggcacggctggctttgccggcaaacatcagattgatgtttccgcatcccagaagcccatcatcaagtgacggcgattccgttggcttcgttggttccgttggttccggggcggcgttcgctccgttggtcctgctgacaacgttggtcccgtcaatgccggggcgatgttcgctgccggcgatttgcgcgagtagcgccatagggtgtatgctgaaaagtccggccgaaaagccggaagcttgataactcaagattgggggcgatcggtttcgacggtgacctgttcgctgcagggaagcgtgccgagaacgccgggtccgctcgtggatgaccccggcaaaagaataagtgctaaatctaaccgcactgagttcgctctcgctgcctgatttttagtcaggattaaccagtgagcagccgctccgttcactcctcctcgtctttgggaggatgctgagcgtcgtttagaagacttgctgatgcagttgagcctcagggctgcatcgggactttaactgcggatatgctcgccatcagttgtctgcgacatcgatgggggcagaaaaatcgccaacttggccagcagactacgcacgtagaagactgtgggctcggtcatcggaccggggttcaattccccgcgcctccaccaatccgcctcggcggaaacaagccgcttggctttacgaaagtaaggctgagcggcttttcttattcccgtcgattccctcgtattctctcggtttcacgggataatgtgggcaaaatgtgggcaaaaatcgagcccgcgaagccctctgccacaacgcgagaacggccccgaccggcaagtaggccgactcgggttgagtcgtctgcgatgccggacggggccgaactgtgcgtggtggtcatgcggcgaggtcaaggcgctgtttgatggcgctgacgccgatgagcgcgccggcgaggatgccgagcgcgttgagcgtggtcactatcgcgtccacgtgagtccagccccatgcggggccgaccgtactgacgaacagggcgagtgcgggcaggacgatgaggcccaaccatttgaggatgtcgtagacgcggctggggattgcgcggttggcttcgatccgacgacctgcggttttggagaccgccgctctaccagctgagctacgcgcataggcggtcatgccggttgattgccatggcacatgaccattgggtggatatgagtaaagcccctgaaccggttgattcagaggctttcacactaatcctgatacggagtatgccacggggtggattcaccttactcccgcttgtgttttgttttttcaggcggcttggatggtgaggcgtccgccgagggcgtggattaccttggcgatggtttggaagctggggttgccgtccttgctgaggctcttgtagaggctttcgcgccccacgcccgcgtccttggcgatctgggtcatgccccgggccttggcgacgttgccgagcgcggcctgcatgagtgcggggtcgtcgtattcggctatggcgttgaggtaggcgatgatgtcctgttcattttcgaggtattcgctggtgtcgtagtcggtgaattcggtgctcattgtcgttgttccttgtagtcgttgaggatgtcgtgggcttgtctgatgtcggtctgctgggtgcttttgtcgccgcctgcgagcagcagcatgagcacgttgccctgcatggcgaagtagacgcggtatccggccccggtgtggaaccgcatctcgctgaccgggcctcccacgggtttgatgtcgccgaatggcctgcctgcgagcttgcaggcatcgagccgggcttggatggcggccttcgctttgtggtccctgagtttcttgaaccacttgcggtattcggcggattgcttgatttccatacctctattgtatcctacaggctacatcatgtcaagccgaacggccgctggagcccatagccaacgcaagaatctcccgtatgttgaactcccagtagccgtcatcgacgggtctcgagctggggagtttgccccggttgagccagttgctgatccgcttgcggctgacctcgtacccgtagtttcccttgagccattggctcatgcctgccggtgtcttggtcaggtgtattgcctcggccttgtcgcggctctgctcgcgcagctcctgcacgttgatgggattgccgcacctgcacaggcgcagcgcctcgcccttcgcggccatcacttcgcgtctgcattcggggcagacgccgattatcctgcgggtgcgcggcctgcggtcaaccttggcagagcgtccatggtgcctcgacctgctggctgccgcagtattggcatggttcggtggtgatgactgcacacgttgtactgtagggaaccatgaaagtcgtattgcaacgagtgtccgaggcgtccgtggacgtggtcaatgaattgggtacgctggatcccacgttcgagccgcagcagattggcccgggattcatgattctggtgggcgtcaccgatggggacggcgacaagcagatcgcctggctggcccataagattctgaatctcagggtgttcgaggatgcgcagggcaagatgaaccgttcgattcaggacatcggcggcgagattctctccatctcgcagttcacgttgttcgccgacgtgcacaagggcaatcgcccgagcttcatcaaggccggcaagcccgagcatgccgatctcatgtggatcaagttcaacgaggcgttgcgctccgggggagtgccggtgaaggaaggtcgtttcggtgcgcatatgcgggtcggactggtcaatgacgggccggtgaccatcgtcatcgacaccgagcatgacatgcctgacggaacacgctgaattgcgatagtaatttgacatcatatcccgttccctccaatatgttactaaagcgctttagtcttctgcgggcgagggcgcatgtcgatatgtttcccatgaacgggcagcacaatgatgtggccgcacaagcggcagagataaggggagtgaccagcagatgttcctgaaacctgaacagcaactggagcggtgcaggcgcatcgtgcgccagcgcgtggaccctcatatccacccatcgatcgcacagctcacggtggagtcctatgacattcccggagagccgatgccctctgacgagttcttcgcgaagctcgatcgaggtgacatcgacttcaagccgttcatgctcggcagtgaatggggcaccacatggggcacggtctggttccgcctgaccggtaccgtgccggccggctacccgaaaggcaagccgctggagctcatcctcgacctcggctggtacccgcactcctgcggcggccatatcgagggcctcgtctaccgtgccgacggcaccgccatcaaagccgtacacccgctcaactattgggtgccgttcatggatgctgagggcaacgcgcaagtgccggtcgccgaagacggcagcttcaccctgtacctcgaagccgccagcaacccgctgctgctcggcgtgcctccgttcattgagaccgaactgggcgaccatgccaccggcaagccggacgagccgtacgtatttaagtccgccgatctggccgaattcgatgaacgctacgagaactactccgtcgatctcgacgtggtgagctccctgatggaattcgccgacaaacagtcgccgcgctactggcaactcgccaaagcattgcagcgttcgctgaacgcctacgacgagcgcaaccccgaatccgtggaagccgcgcgcgcagtactcgccggcgtactggccaagccggccaatgcctcggccatgaacgtcagcgccatcggccacgcgcatatcgactccgcatggctgtggccggtgcgcgagacccgccgcaaggtggcccgcaccgtatccaacgcattggcgctgatggacgccgaccccgacttcaaatacgcgatgagctccgcccagcagtacgcctggctggaagaggatcatccggacatcttcaagcgcatgaagcggcgcattgaagaaggccggttcatcccggtcggcggcatgtgggtggaagccgatggcatgttgcccgccggtgagtcactgatccgccagattgcatatggccgcaaatacttcaaggaacatctcggtgtggagcccaagggcgtatggctgccggacagcttcggctacaccggcgcatggccacagatcgcccgccgtgccgggtacgaatggttcctcacgcagaagatctcgtggaacgataccaccaagttcccgcaccactcgttcatgtgggaaggcatcgacggctcgcgcatcttcacccacttcccgccggcggatacttatgccgcttggtgcaaggttcaggaactcgactacgccgagaagaacttccaggacaaggatctctccgaccgctcgcttctgctcttcggtttcggtgatggcggtggcggccccacgcgcaacatgatggagcacctgcaccgctacgagaacctcgaaggcgtctccaaggtgagcatcgaagagccgaatgacttcttcgacaaggcgcatcagcagcttgcagagaacgccggcccagaaatgcccgtctggaagggcgagctgtatctcgaactgcaccgtggcaccttgacctcgcaacaggacatgaaacgcggctgccgccaagaggaatcgctgctgcgcacggtcgaatacctgggcgcagccgccgtgttgtccgatccggagtacgtctacccgcgcgaggagctggaccgcatatggaagacgctgctgctgaaccagttccacgacatcctgcccggctcggccatcgcatgggtgcaccgcgaagcccgcgaggactatcgccgcgacctgaagcgtctcgccgaaatcgcccaagacatgtgcgccgtgctgcgcaaggccaacccgcaggccgacctgctcgccgaggcccgcatcagccagttccgcaatgacggcgcgtcttggcatgccaaccgcatcaacgaaccgaccgacgcgctttccgtactgacccagacattggacaacggccgtgtgctgctggccaacggcgtactgtccgtcaccatcgaggccgacggtacaatctcgtcgctgcttgacgaggagcatggccgtgaactggttccggccggcacccgattgggccaatacgaactgttgagggacgaacccgccgtttgggatgcctgggagatcgaacgcgaatccctgctcatggcgaatgccgtgaccggatcaatcgagtcggtgaataccgaaaacggtgcggcacaggtccacgtgcataccgccgacggtgataccgtcattaccaccaccatcacgctacgccccggctcgcacacgctcgacttccatgccgatatcgattggcacgaacgcgagcgcttcctcaaggtcgatctgcctctgggcattgtggccgatcaggcgacctacgactgccagtatggtctgatccgccgcccaattgtcaaaaacaccgcatccgacgaagccaagtatgagagcagcacgaaccgtttcgccattatcggtgatgccggttacgccgcagccgtcatcaacggatcggtatacgggtccgatgcctcaccgatcgccgggaacgccgccgaaggtcgtgactcgggcactatgttccgactgtcattgctctccgcgccgaccttccccgacccgcgcaccgatatcggctcgcacgagttcgactggtccgtggtggccgacgccacggtggaccgtgcgcttgacgccgccggtgtgctcaacgcaccggtactccatgatgtgcccgatatcacgccgctcgcctcgatcgagtccgtcaatggtaccgtggtgctggactggatgaagctggccgatgatggttccggcgacctgatcgtacgtgcctatgaggcggccggcggccaggccgatgccatgctgcacgtctgcccggcgctcgcaggcgcttcggtgcatgagaccaatgtgctggaaggcgacgatctggccgccgaccttccagtcgcgttgcaagacggtaggcagaacgccgaaggtgccacgctgcactttggcccgttccagctcgccaccctgcgcatcacgcgctgaattcccgtctgatgcttctgcctcctcgaaccatgaggaggcagaagtatgtcgtattacggttttccaaattaccaccacacccatcatttccatcattcccaccagacacagcaaaggagaactctccatgtttcttctgcccaatcagcagttggagcgctgcgaccgcgtcatgcagcagcgcgtcaaaccgcatatccacaccacactcgccgcatgcaccttgcgctcgttccacaatcctggtgaaccggtgccctccagcgaatttctagccaaagtgcgcaacggccaagtgcccttcgaacctttccgcgttcccggcgtctggggcaccacatggggcaccacatggttcgaggtgaacggccacatcgacatggcggcggtcaaaggacgaaaagtcgaactcatggtagacctcggctggctcgatcaccgcggccccggattccaatccgagggacttgtctatcgtgccgacggcaccgccatcaaatccgcgaacccacgcaaccactggattccactcgtctacgcggacggcagcagcactgtagaactcgatgaacatggcgacttcaccgtctatatcgaagccgccgccaacccattcgtcgaaggccccaccccgttctcacccaccgaactcggcgaagaggccaccggcacctgtgacttcccatacacactgagtcgcatggatatcaccatcttcaacgaagacgtgttcgcctatgacatggacttggaaaccgtatcttccctgattcgcgaactcaaagacgacgacccgcgctactggcagctcgccaaagcgctgcaacgctccttgaacatctacgatgaacgcgacttggaaaccgtgccggcagctcgtgcggcgctcgccggcgtgctcgccgaaccggctgcatccagtgcaatcaaccacattgccatcggccacgcgcatatcgactccgcatggctgtggccggtgcgcgagacacgccgcaaggtggcccgtaccgtatccaacgtgctggctttgatggacgaagacccggacttcacgtatgcgatgagttccgcccaacagtacgcatggctggaagaagaacatcccgacctgttcgcacgaatgaagcggcgcatcgaagaaggccggttcatcccggtcggcggcatgtgggtggaatctgacaacatgattccttccggcgaatcattggtgcggcagatcacgttcggccgccgatatttcaaggagcatctcggcgtcacgccgcgtggcatctggctaccggacagtttcggctacgccggctcctggccgcagatcgcgcggcgagccggctttgactggttcctcacgcagaagatctcgtggaacgacaccaccaagttcccgcaccactcgttcatgtgggagggcatcgacggcactcgtatcctcacgcatttcccgccctctgacacctactgctcgtcgatgagcatgcgcgagctcatgtattcgcagcgcaatttcctggacaaggatctttcccgcaacgcaatcctgctctacggtttcggcgatggcggcggcggccccacccgtgagatgaccgcacgcatccggcgcgaccatgatctcgccggtgcgccgaaaatcgatttcggtactcctgatcagctgttcgatcgcgtgcgcaaggatatcgtggacgatgcccgcggcgagacaccggtcttccacggcgagctgtatttggaactgcatcgaggcacactcaccgcacagcaggatatgaagcgtggttgccgccaagaggagtcaatgctgcgtgtcgtcgaatacctgtgcgccgtggccagtatcaagaacccaggttacgtctatcctcgtgaggaactggaccgtatctggaagaccctgctgctcaaccagttccacgacattctgcccggttccgccatcgcatgggtgcaccgtcaggcacgcgaggaatacgcgcgtgacatcgcacatctgcgtgacatcgctgcggctgccggccaggccgttaaagaggccgagccaggcatagcgacggtgaagcatgccgtgattgcgccatatgcaagcaatccgcagtattcatgggctgtgcgtgacggtggtggaacggctgtggaagagtctgtcattccggtttccgtcgagcgtggcggaaacgccatcatacttgacaacggacgtcttcgtgtgcgtattgaggcggatggcaccgtctcatccctgatcgatctcgctttgcgtcgtgaacttgtgccatccggtgtccgcatggggcgctatgagctgttgaaggacgagccattccattgggatgcatgggatatccagcgtgatgcgttcctcgccgccgatacgctcaccgacgccatggtcgagcatgtggaagatatgcccgacggctcggctgcgattcacgtcgtcacccgtgcgcgcggtgttgagatccataccgtcatcacgttgcgcccggggtccggcagtcttgactttaccgccgacgtgaattggcatgccgtggagaagttcctcaaggtggatatgccggtcacggtgcaggcggtgaatgcgcagtacgaatgccagtacgggttggtcgaacgtccgatcaacaagaacacgcgcagcgatgatgccaaattcgaaagctgcacacaccgcttcgtacgtatcgccgatgccgactatgccgccgctgtggtcaacgcctccacgtacggatccgacgtcagcccgatccacgccgccgcggcgcacggcgccggccgcggcaccatggtgcgactgtcgctcctgtccgcgccgctgtaccccgatccacgcaccgaccagggagagcatttcttcgcctggtcgttggttgccggtgccggtatggaatcggtgctggccgaagcatctcgtctcaacgcgccgattatgggtgagctgccggccgtgagaccgctggctacgctcactgatgttgccggcacgccggtactggattgggtaaagctggccgacgatggttccggcgatcttatagtgcgtctatatgaggccgccgggggcgacgccaaggcaacgctgcgccttgatgatacgttcgcaggatgcacggtggaggaggtgaatctcatggaggagccggtgctggccgatgatctgccccgtgcgctggtcgccggagggccggtgcccgctgagggtgcatccgtctcgttcacgccgttccagatcgtcacattgcgtattcggcgatagggacagatggtcttaaccccgatattgcaatcgcgctcgatcatgcgggaatcggattcctccgagatgctgcatggtcgcgcgcgattgcgcgttatggcggggatgggaggcggggtaacgatatgcgacatgtgacacgatgatgttgcgttcgtgcacacatcgtgttattctctaactaaatcgctttagtaaccggcgaatgaccatggtggtcagctaagtcgctttagtctcagcgaaaagtacacgacaaaaggagagctatgctgctcaaagtcaatcgcgagattgatcgttgcaagcgcgttatgcgggagcgtgtttggccgcatatccatcaggtgcttgcacagtgcacggtcggcgcagtcaagaacccgggagaaccggagatgcccgctgcgttcatcacgcgcgcagtgtccgggcaggtcatttttcagccgctcgctgtaggcgaaccctggggaacctcatggggcacgacctggatacgtgtcgagggacagttgcccgaaaccctgcccgaggggcgagccatcgagctggtgttcaaccttggttggctcgaatggcccgtcggcggtcacattgaggccatggcataccgtgccgatggcaccgtcatcaaggcactgcacccgcgcaatcactggatgccgcttgtctccgctgacggtgtcaaggatcgtgtggtcaatcctgacggctctttcgtggtttatgtcgaaggcgcttacaaccctaatgtcccgtcgtttaccgttaccgagctgggcaccaagcccaccggcaaagcagacgaacgctatgagttcagttccatcgatatcgccgctctggatcaggacatgttcgactactgggccgaccttgacgtcgtcaccggatctctcgaaaacatgaacgacgctgacccgcgctattggaagctcgccaaggccatgcagcgatccatcaacctgtgggacgagaaagactacaacacgctcgccttggctcgaaaggcgctcgacaaggtgatgcacaaccccgccaatgcctcggccatgaccctgaccgcaatgggtcactcgcatatcgactccgcatggctgtggccggtgcgcgaaaccgaacgcaaggtcgggcgcaccgtatccaatgcgctcgcgctgatggatatcgacccggacttcacctacgtgatgagcgccgcccagcatttcgcatggctcgaggaacgccaccccgacctgttcgaacgcgtcaaggcccgcatcgcggaaggccggttcatcccggtcggcggcatgtgggtcgaatccgacggcaccatgccgtgcggcgaatcgctgattcgtcagatcagttacggcaaacgatacttcaaggagaagctcggcgtcgtgccgaacggcatctggctgccggacagcttcggctataccggcgcatggccgcaaatcgccaagcgctccggctactcgtggttcctcacccagaagctgtgctggaacgacaccacacgcctgccgcatcactccttcatgtgggagggcgtcgacgggtcacagatcttcacccacttcccacccgccgacaaatacgattccgacatgtccgcgaacgacatggcctacgtgcagagcaactacaaggacaaggacctctccgaccgaggtatcttgttattcggctatggcgatggcggcggcgggcccatccgtgaaatgacgatgcgcgagcaccgctttgaaagttttgaaggtatgccaaaagtcgaatacggcactccggacgacttcttctccaaagctgaaaccgagatgaaggccgaggccggctcggaaatgccccgatggaaaggcgaattctatttcgagctgcatcgcaagacgttgacctctcagcaggagatgaaacgcggatgtcgcaaggaagaatcgatgttgcgcacggttgaatatctcggtgtcgtggcttcgctcgaatctgccgactatgtgtacccgactgagcggattgatcgcatctggaagacattgctgctcagccagttccatgacatccttcccggctcggccattgaatgggctcatcgcgtggcccgagaagaatatgcccgcgatcttaaggcgctctcggatatcgcccgtgacgcgatcgcggcaatcgccgtcgccaacccggacgtggcccgtatcgccaaagcccggatcagccaattcgccgatgtcgatccgtggcgtccggcatcgctggtctcctgtggcgaaccagtcgaggtgaatcgtcgcgaagacggctcggctacgctggataacgggctgctgtgtgtccacgttgccgccgatggcaccgtcgactcgatgatcgacctgaagtccggacgcgaaatggtcgccaaggatcacgtaatgggccgttacgagattctcaaggacgagcctggcgtattcgatgcctgggatgttgaacgcgatgccttcctgtgcgccaccgcattggctgacggacatatcgtctcgatcgagaccaccgcagacgggtccgccgtgatcgtcaccaagaacagttaccgcgacgacgagatttccaccacaatcacgttgcgcccgggcaaaagccagcttgatttccatgcagatgtcgaatggaatgtgcccgagaagctgctcaaggtagacatccccatggcactgagcgccagccgtgcccagtatgaatgccagtatggcctcatcgaacgcccgatcgtcaagaacaccgaaggtgaagaggcgatgttcgaaagctgttcacatcgcttcgttcgcatacacgattcctcatacggcattggcgtggccaacggctcgacctatggctccgacgtcagctcgctacgtgatcgggatgatgccctcgccggcacgatggtgcgcatgtcgttggtcgcggctccgacggcaccggatccacgcaccgacatcggccaccacgagttcgactggaccgtactgccatgcgcttcggtcgcgccactggtcgccgccgctggcgagatcaatgctccgacgattgagaacatgcccgacatcgccgcgccgatcacgctggaacccatagagggcacgccggtcatcgactggatcaagctcgccgatgatggttcgggcgacatcgtggcccgactctatgaggccgccggggcgaaagccaaggcaatgctgcatgtcggcggtacgctggacggctggacggtgcgtgagacgaacacgctcgaacaggatgaatcctacccggatgaacctgccggacttatcggcggcaagcagcaggccgaaggcgccgaactggcgctcaaccccttccaactgaccacattgcgcctaagccgcgcctgatacggattcggcccgggtcctgaacccgggcatggtccttgcctccaaccgtcaatcgacatagcagtcgaatcgatgcgttcgccaacggaattcagcctccccgtgagcgctcaacatgaaccggtcggcaatgaccgcgttcccaccatacgtttcgaagaacaaaccaaatatatcaaaggagaaaacaccatgaaaggcacattcaagaaggcggtcgcattgggctctgccattgcccttgtgggcggactcgccgcttgcggatccagctcgggcgacggcaccgccgaactgaagttccagacatggaatctgaagaacgagaagttcaccgactacttcgagggactgatcgaccagttcgagaaggagaaccccggtatcacgatcaagtgggtcgaccagccagccgacaactacgaggacaaactgtccaccgacgccgctgcgggagaactgccggacgtggtcgatatgggccctgaaccggcatatacgctggccagtgcgggcatcctgctcaatctcgccgatgccgtgccggaagccgaagatgacttccttccagctgcctgggacgccgccacactcaagggaaccgaccttgaggaaggcacctacgggttcccctggtacctcaactccggtcccaccttctataacaaagcggtgcttgaggagtgcggcatcaccgtggatccgaacgacccgccgaccaagcaggacgacatcttcgcgatggccgacaccttcggctccaactgcggtggcaagtatgcactgacctccggcatcccatccatccaggacttcggcatgtatggcgtggaactgatgaacaaagaccacaccgagttcacgttcaacaacgcgaaaggcgtagaattcgtccagcactacatcgacatgtacaacgccggcgccttcaccgatgacatgctcaacagctccacctcgggtgagtccaagagcttcaacggtggaacccaggcgtttatgaacggcaacgcctacagtgtggacgatattcgcaagaacgccccgaaggtgttcgagaatctggcgatcaccgatttcatcgccaacaccaagccgaacatgttcatggagatgcttacggtcaatgccacaagcaagcaccaggaggaggctatcaagttcgcccgattcgtgaccaactcagacaaccagctggcattcgacaagaaggcgaacgtgttcccgtcttcgaagggtaccattgacgacaaattcttcaacccgtccgacgataccatggacgccgaagccatgcgtatgtccgccgatcagattcgcaacggtgagatttggggcccggcccagttcacctccgcctgctccaccatgctgcgtgaggaaatcgctcaagcgctgcaaggcaagatcacggccaaggaagcgcttgacgccaccgtcaagtactgcaacgaacggctctaattatggcaagcgaagcgaaatcaaggaagcgcgcggccaaggcctcacgccaggcggggctgggaccgaacagtagcggacgcattgttccttggctgttcgtgctgcctccgatcctatggatctgcactttctccctgttcccgttcttcaatacgatcaggctctccttcaccgattccaccctgctcaagcccggtacgttcgtcggccttgaaaactacatcgacatgttcaccgaccgccgcttccagacggcgttcttcaactcgtcgctgtatgtggtgtgcatcgtcccgttcatggtgattctgcctcttatgctggcctccctggtggccgagaagacccgcatcatgaacttcttccgcaccgccttctacacaccggtcatcatgtccagcgtcgtcgtcggcttgctgtggaccaatatcctcgataaggatggtctgctcaacggcacgttcaaggcactcaaatggatcaccacgccaattccgttcttgaccgatcgctggctgctgcttttcagtgccatggccgtcacgatctggagtggtctgggctattacatgcttatctatttggctaacatcgccaatatagacagcacattatatgaggcggcttcgattgacgggtgcggtggcatccgccagttcctgcacgtcacattgcccggatgcagaatgacgatgatcctagtcatgctgctcagctcgatgtccgctttccgagtcttcggcgagatctacatgctctccggaggttccggcggcgtcggtggcgccgatctgacgatgaccatgctcatcaagcaggaaggtaccggcatcaacgcccgaaccggctactccggtgccctcggcatggtgatgttcgtggtgctcggttgcatcatcggcatcgaatggttcattcagagcaggagcgaagactgatggcaggcacacacgcagtcatggaaaacaaatataatcatgtcactccgggcaaggtcgttcgcatcatcgtgctgatcgctctgctgctcttcctggcggcacctctgctgtggcagatctcactggcgttcaaaggtcccaaggatgacatgtacgccgcgccctacctcatccccgttgacccgacaatccagaacttcgtcgatgtgttcaatcgtctgccgttgctcttctacgtgtgcaacacgttgatcgtggcggcattgaacatcggtggcaacatcatctcaggatgcttcgccggctactcgatcgccctgctcaagttcaaaggcaaggggctggtcgtaggcctgctgttcctatcgatgctggttcccggtgagacgatcctcatctcgcagttcctgattatccgcaaccttcagctgcagaacaacctgatcggcgttgccttgcctggattggtcagctccatgaacattcttctgttcatgaatgcgttcaaggccatacctcgcgagatgatcgaagccgcagaggtcgatggagccaatgtctggcaacggttctggcgcgtatgcgtacctcaggtcaagggaaccatggcgttggtcggcatcttctccttcatgggatcgtggaacgacttcctgtggccgttaatcgtgctgactgatgactcgcactacacgcttacactcggcatgagccgtctgcagggcaccttcgtgtccgatccgcgtgtggtcgcagccggcaccataatcgccctcgtcccgatcatgatcttcttccttgtcttccaacgttatatcttcaatggcctggaagctggatcggtcaaggaataatcaaaggttcaccatgaaattcggagtcaactacacgccttcgggcgaatggttctacacctggctcaatcccaaatgggaagtcatacgccgggatttggcgcagatagccgagctgggtgcggatcatgtgcgtatatttcccctgtggacgctgctgcagcctaatcgaacttggattaatcccaaggcattggcagatgttcgccgtatggtcgaactcggtggagaagccggtctcgatgtctatgtggatgtgattcaggggcacttgtcgagtttcgatttcgtgccttcctggctggtctcctggcatgaaggcagcatgttcaccgatcagtcggcgatagaagcccagagtgcgttgactgaggcgatttacggtacgttgtctgacatgaaggcctttgcgggccttacgttgggcaacgagtgcaaccagttcactgatgccacacatcccagacgcatgccggccaatgccgagcagattggtgaatggctggatacgcttatcggattggttgccaagcgatgccggcgcgatggccgtctaatcgcgcatagcgaaaacgacgcaatctggtacgccgatggccatgccttcctgcctagatatgcttcatgcaagggcgacgtgaccaccgtgcactcctgggtattcaacggtaccggacagcattacggtccgatgtcatgcgaaagcctgggacacgcggcctggctcgttgaactatccaaggcattcgctgctgatccgcatcgcccggtgtgggtacaggaaatcggagcacctggcaatgtgatcgattccgccgatgctccggagttctgccggcgctcgattgatgcgattgctgactgtcctgatgtgttcggcgtcacgtggtggtgctctcaccgcatcccctcgacattctcggatttcccgttcttcgagcaccagcttggcctgttcgatgtggacgggactctcaccgacgttggcaaggcgttccgagacgcaatcgccacccaccgggatacggttgcaccgccacgcacgacagcgattgtcatccctgtggatgaacagggcgacccgctcatgcgagctgctcaagctccgggcggctcgctcttcgaggcatgggcgaacttgaatcgtcagggtgaaaggccatgcgttatcacctcgcttgatgctggcaatccggccaagctcgccaatcggggcatcgtccgccttgagcgcgtcgaactcgtggcgggccatgcctacaatgcggtgtctgatccagctttcgagcataaaggcgaatgatgacgcattgacgaacagtcatacgatgtagtacaaaccgttcgtcattgtccggacatccagacatcgaaataaccgaataattgttcgaagttcctcttcgaaggggccggctctcctcggcttgaacttggcggccggcctttctataacagacgatgctattccttgcaagatgttggcactcattacatttgcgcatccggcgcaccggtacgtaccggtatcggtgcgccattgttcacacacatcgcgcatccaatgggggagacgacgtatggtagatgcgacgctgttcaccggtcagccgccgaatagtgatccggcggcccgccctgaagccatcattcggggggatcggtggcgtatttcgattctgacggactctttggtgcgtttcgaatggtcggatgccggcgtcttcgtcgacgaacgaacgcaaagcgtcatcaaccgtgatttcggagagcctgcggcatacactgttcgccgtgatgccgatggctggctcgatattgagaccgaacggttacgtatcgtttatgatggaggcccgttcactgccgagggcttggcggtaagtgtcaaggattcgctgtcacaacacaacacttggcgttacggcgacgctcagaatgccaatctgggcggcactgtgcgaaccctcgaccagattgacggtccgaccgaactcgaacccggcctgctgtctggtgacggttggatgattcttgacgattcggacgacaatctggtagtcgaagcatctgaagtcaatggcagccccaatccatttggctcatgggtggcccgtaagccggtctcctccaccgatctgtattttttcggatacgcgcggcgtatccacgatgcactgcatgactattaccagctcaccggaccggtccctctattgcctcgctgggcgttgggcaactggtggagtcgctatcatcgttacagcgaaaccgaatatcgtacgctgatagaacgttttgaaacagagggcatccctttcaccgtcgcggtgcttgacatggactggcatgtgaccgatcccgatccgtgctatggctcagggtggaccggattcacctggaaccgcaccctgttccccgacccggaacgttttctgggatggctgcatgagcggggtctcaaaaccacgcttaacctgcatccgcgagacggcatacgtgcgttcgaggactgctacgatcgcatggctcgggcagtgggcgttgattccaagtccggcagctcgattgagttcgatgcgtcctcgccggtgttcatgtccgcttacttcgatcaaatcatccacccgatggaatctcagggcgttgatttctggtggatcgactggcaacaaggcagcgtgactcgccagccgggacttgacccgttgtggatgctcaaccacctgcacttcctggactcggcctcgcgaggtcggcggcctatcacgttctcgcgctatgccggttacggctcccatcgttacccggtcggattctccggagatacggtcgtatcgtgggaatcattgaaattccagccgtactttacgacgatggcttcgaacatcggctacggatggtggagccatgacataggcgggcatatgttcggctaccgggacgaggaactggagacccgatggtaccagctcggcacgttcagcccgatcaaccgtctgcactcgaccgactccccattcaacggcaaggagccatggaacttccactccccggctcgcgaggcgatgatagccgcacttcgtttgcgccatagactcatcccgtacctgcatacgatgaaccgtcgcgcggcttatgacgggctgccgttggtcgagccaatgtactggaaccacgggggcggcaccgtgcccacggaatttgagttcggcaccgagctgatcgtttcgccagtgctcgaaccggccgatcaggccgcaggccgtgccaaagcagaggtctggctgccagtcggccaatggttcgacttcttcgacggaagacgttacgtagccgacaatccggagggccgcacgcttggtgtatggcgtactctcgaccgtatcccggtattcgccaaagccggaggcatcataccgatgcaacgtctcgacggcgctccactcaacgatgtttccaacccgtcggcattcgatgtactggtatttccgggcgcggatggcacgttcacgctatgggaggatgacggcgagtcggtcggcggagaatgggcttcgacccgtcttacgtttgattgggtgcgcggcatgttcaccgtacatgcgcttgacggcgacagttcgctggtgccgagctcacgcgcatggcgtctcatattgcgaggtgtggaacagccggacggcgatttgccggcatcggtctctatacgccatggcggtcggccaatcagcggcacagtcgactatgacccggatacgttaagcctaagcgtcgaggtcggcgctctgaatgtggacggcgacctgacgattcacgtggctggaggactttcgattgcgccgtcgccggtcgagcgagacaccttcgacatactcgccgacgccaagatgcactatttcaccaaggaacgggcctggcaatccgttcagcgcgagggcatacgcgcgctcgccaccctgcacacgctggaaatgccgccgggcgactacggggagccgaggtggttttcctcgcatatgccgcaaggcgtcatcgaggcgttgtcagaggtgttgctgcgcgactgaacaggcgcgcgggccccaagcccatacagatatgtcccgacgcaagaatgcggcggggagaacaggaaaggaaaccgatgaacaagacaatgacgtggcgccgggtgctggcggcctctcttgccgcgatgcttgcgatgtcgctggcggcatgctcgggaggcacctccgcgaccaagtacacgatcacaccggagaacgagaatgaggagcttgtgctgggcaaccggcccgaggcgtcctactggttcccggaagatctgctgaagtggaatgcggacaaagacccagatctagcatacaatgtgagcactgtgccgttggccaagcgtgtggacaaggccgacctcaaaccagtcaatgacacgcagaacaccgataccaaggtgatggccatatcgatcatgaactcctcgacaagcggcaatgcccctcatggcctgaacaccgcgaacgcgaacacgttctcgtattggcagtacgttgacgagcttgtgtactggggcggctcttcgggcgaaggcatcatcgtgccgccgagccccgatgtgactgacatgggccataccaacggcgtgccggtgctgggcacagtcttcttccctcagaacgtatcaggaggcaaggtcgaatggctggaccagacgcttgcccaaaagtccgatggctcgttccccgtggcggacaagctcattgaggtcgccgccacgtacggtttcgatggctggttcatcaaccaggagacagagggtgagaatgaaacctcgctgggagccgactacgcgacgaagatgcaggcgttcatcgcctacctcaagaagcaggcccccgacctgcgtgtcgtgtattacgactcgatgaccaaggacggctcaatcgattggcagaatgcccttaccgatgaaaactcgatgtacatgacggatggcgatcatccgatagccgatgagatgtttctgaacttctggtggaccgaggacaaactggccggcgacgacctgcttgccgcctccgcaaccaaagccaaagaactcggcatcgacccgtattctctgtacgccggtatcgatgtgcaggccgacggctatgacaccccggtcaaatggaacctgttcgccggcaaggatggcaagacgcatacctctctcggcctgtactgcccgagctgggcatattggtccgccggcaatccgaccacattccgcaaaaacgagagtcgtctatgggttaacgatgagggtaatccatcggtgagcactccgtatgaggacgatgagaagtggaccggcgtatccaattacgtggccgagcagtcggctgtcacctcgctgccgtttgtgaccaacttcaataacggttcgggctacagcttcttccgtgaaggcaagcagatttccaagatggattggaacaaccgttccgtcagcgatatccagccgacctatcgttggatagtcgccgatgagggcggcaataagaccaaggccgattacagcgatgccgacgcctggtacggcggatcgtcactgaagttctcgggcaaggtcgccaaggatggcaagaccatggtcaagctgtactcggcgagcgtcaagacaggggcaaagccgacgctgtcgattgccgccaaggccaatgtcgataccgatcttaaggccgtgctgaccttcgcggatggctcggtcgaaaccgtcaatggcaagaagaaggtcggcaacgattggggtgtcatcgactacgacatcgccaagttgtcgaacaagacgctcaccggcatcgacttcacctaccagtcttccgaggataagaccggctacgagctgttgctgggcaacatcacgctcaaggatggctccgaggagaccgagctcggcaaggtcaccgaagtcaaggtcgatgacagcgagttcgacgatgacgccctgtatgccggtgcccgcatttcatggaagaccgatggcaaggctccggcctacgagatctaccagatcaacgaggacaagagccgttcgttccttggcgtctcaaacgtcgagaacttctatgcaaacgcactgacacgtgtaggcgagaccaataacaccacgttcgagattgtgccggtagaccgttatggtacgcaaggcacgagcgccaaggccgatatggattggcccgacaacagcaagccgaaagccggtgccacggcttcgcgcacactgctgaatgtgggcgacgaagtgacgttcacctccgcaagctcgaagaacactgccgaggtcgcctggtttctgcccggatcaagcaaggagcatgccactggcaagtccgtcaccgtcacctacgacaaggagggcgtgtatgacgttgagatcaccgcgaagaacaagagcggcgaggccactgcgacgctgaaggggcagattgtcgtctccgcggatgtcatggaccttgtgttgctctctcaaggcgctcaggtcagcgccgacgggttcacgaacggcaacgagaagcctgagttcgcggttgatggcgacgtgaagaccaagtggtgtgtcaccggcccggctccgcatgagcttgttgtcgatctcggcgcacccaagaccgtctctcaagtcgatatttcccatgctcaagccggtggagaggatgccagcatgaacacgcaggaatatgcgatcgaggtcagtgaggacggaaccgaatacacgcaggtcgcgttggtcaagggcaacactgaaggtgccacgtccaacgcctttgccccggtcaatgcccgttacgtcaagttggtggttaacaagccgacgcagggcagcgacactgcggctcgtatctatgagatgcaggtacgtggcgcagacggcgcgatcctctaggagccgctgtttgttctgacgaatacatcgcttccgggtgagccggtatatcggtgttacccggaggcggcatctcggcccgtatcgaatgcatgccgtgcgaatttccactttgtggggaatgagggcaaagaagttctgtatcgatgtgggccatgccatatactaaactgattcatgcagtatgcatgcaatggtgagtgctatcgaagtccgttttttgaggttccccattgcggggaaccaacatatcgcgaaacgggagagtacgccgatgacgagcacggagccgacgatgaacacaaaccccctccacttggagtcaggagccgcgcatccggtcgccaaaccgcatcgggtgggcctcaaggacatcgccgacgagctgggaatctcgcagaccgcggtatcgttcgcgatcaacgatcgtcccggcgtctccgaagagaccaaaaggcgcgtcaaagaggctgcgtcgaagcttggctggagcccggtgtatgcggcgcaggcgctcggctcatcgaagaccatgacggttggcttcgccccggcacgctcctcaaacggtcttcgggacgaaggcttcatgctgcatttcatgaccggtttgcatgaatccctgagtctcaaaggttacggtctgttgtatcggccctgctcatcggtcagggaagagttgtcggtctacgaggattgggctcgacgtaagcgtgttgacggtgttatcctcgttgacctgcgtgctgacgacccgcgccccgcgctgcttgctcggctcggtgtgccggctgtgcttgcgggaggtccggatcctgagaacatcgtgccctcgctgtcgattgacgattcaggcgccatggaaacgattctccgacatttggtatcatgcggacaccggcgtatcgcatacctatcgggggaccgcacccttgactattcgcgtgatcgcgaacgaatgttccgtgaattcgcaaagcgccgcgatcttgagtcgatccgtgtcgaatacaccaacttcagcgtagacatcgcctcggcaatgacgcttgcaatgttgtgtggaagcaatccgcccaccgctttcatctacgagaatgagacattggccgcagccagtctgcatgccattaccgagtggctgctcaatacgccgtccaagaatccggacgcaccgcgatatccgcataatcttccggctatcgttagcttcgaggacagtttcttgtgcgtatcgatctatccatcgctcacgtcggtacaccgagacccgagcgtgtatggaatgaaggtcgccaaactgctgatcaaggtcatcaacggtgagacggtcagtggcacccgccgcatcctgactcccaagctcgtgatcagggacagtaccagactttcctgtgtctgattcgtctacggctacatcctgctggtggagcggatagaaacggcatgagacgggaataggcaaggtccgacgggagttttccgtcggaccttgcctattcgttatcacgaattgtatcgccttacgccgcgttcttcacggccgtcgcaatggacacagccgggtcgaggaacggaatcaacgtggactggaaggcgtggtacaggtcggacttgcccggccagaccgtgccgatcacatgattgccgccgtcaagctggtggaaccatgatccgccttcgtggtcgatgacgtgctcgtcgacgtagcgggcgaatgtggcgtaccagtcggcatatcgtgcctcgccggtggcggcgtgcaacgtggcggcggtgttcaacgattcggccgccgtccaatgcatgcggtcggtgaccaccggcatgccgttccagtcggtcgtatagacgagtccctgcgcgccgtcgacgttccacgcatcgtccaccgcccgcgcgaacaggtgctcggcggcgtcgatgtacggtcgcgcgccgtcccgattggcgaaggaactcaacgcccactgcacgataagacgcgcccattcgatgccgtggcccggcgtggcgccatacggtttgaactggtcgtccttcttgtcggcattgcattcgagatcgactgaccagtcggacttgaaatgctcgggaatgcgccatccgttgtgttccgcccattcgatgacgtggtcgatgatgcggccggcgcggacgcgataggtgttgttcccggtggcgtcggccacggccaggaacgcctcggtggtgtgcatgttggcgttgagaccacggtacgggtcgagctcggtgaattcggtgttccaggtatcgacggccaaaccgatttcgtcatcccagaaatgcttgtcatacgtggcaagcgcctcgtcaagcagttccttggcgccgggccgtccggccagcagggcagaggatgcggcgagtatcacgaaggcatgcgcatagcagaccttgcgcggagcatgggtgccgtccgcgaacacctgcggataccagccgccatgctcgtcgtcatgcagaatgccggtcaatcccttgagcgccgcatcggccagctcgcccgcacccgggtatccgagcatggcgccaatcgaatacacatgggccatacggctggtgatccacgtttcgacgccgtgtgaggggtcgagggtgccgtcggcgttcagccagccggaaccgccatccggcgctgggaagcctttgccgaacttcagcagctcgtaggtttcggaagccatgaaaatgcggttggcttcggtgccgagcgtataacgtgggttattggtcataatgattgttcctttccttaatgagaacatgcggtgggtgcgcgatgagcatgcggcggacacgtcttagtgcttcacgtgaatgtcgaaatagtccatgaccagttcgcagaacatcatattcgaccagctgaaccattcgcgcgtgtacttggtcggatcgtccacgtcgatgccttcgtgcatgagatgtgtaccggcgtcggtggttacaagacggtcgaggatatgcgccttgaagtccttgttgtcactggtcatcgcctcgatagacagggcgatgggccacacatagtgcggcggggtgtgcggtgagccgatgcccttgagatactcgccctcgtaatagtacgggttttcgtcgctgagcagcgtgcgtcgggtcgccagataggtcggatcgtccggtgcacagtatcccaagtaaggggccgccatcaaggagggcacattgctgtcgtccatgacattgacgtgacccaggccgtcggtctcgaacgcgtaaatcgtctctccattgcggttcgtcgtcttggcgtggttttcgatgccttcggtgatggtgcggcgcagctcgccggcgcgtgcggcgatatcggcatcatccagaatctcaccgccgaagatgcgttccagatagcccatcaccacggcggcgaacatgttcgagggcaccaaatagtggtaggtgcaggcgtcgtcgctggggcggaagccggaccaggtcatgccagtgtacgccaccggcaaccccttgccatcgttgctcaacgattcggtgggaatgtccgtgtcgcggatgaagaaatacggggagttctcgtgatgctgttcggtctcgaagacgtcaagaatcttcttgacgccggcaatgaattcgtcattgaaatgatcggtgttgccggtgttcgcatacagcatccaagccagctgaatggggtagcacagcgagtccacctcgtacttgcgctcccaaagccagggactggagaagtcggactgatcatccttgtcccaggaagcgccgttcggctcctcgttgaaggcgttcgcatacgggtcgatggtgatgtagcggaactgctgccgcaccagaccggcgatcaggctcgcaatgtcgccgtcttcggcggcaagggccagatatgggcgcaattgtgcggtcgaatcacgcagccacatggccgggatatcgccggtgagcaggaatgtggtgccgtcgtcatgccgtttgaccgtggtggtcagggtgttggcaaagcaggcgttgaagttctcggcccaggcggcgtgttcggtgccgcacaggtccgtgatgtgctgcatgaaatccgagaccgacttcggtatcgcggtggtcgtcataattcaacttctttgtttgaggggtatacatatcaagggaacagcattattctaaaccgctttagttcatgacacgcgaaaggatgtgaagagcatgagtgtgagcgcaccatatgaaaaaccggtgagatttcctgttcggagaatctcaccggttgcgatcagtcgattcgtgaagtcgcacgaatggcggataaggggatgggtggattacttgccgatttcagccagatagtcgggcatctcggccgggtactgcggccaggcaccggcctgggtgcagacgtaggcggcggtgttgacggccttgcggtgggcttctgccagcgtgtcgcccagcaggatgcgggcggtgaaggtgccggagaaggagtcacccgcacccacggtgtcgttcacctcgacgtgcggagtgtccagcgtggagacctcgcccttgcgggagatgatggtggagtaggcggagccggcggtcagaatcacgtagtcaaggccgaattcctcgatgaaccagcgggaggcgtcttcgccggaggtgccgcggatgtcgaacatgtcgcgcagcagcaggagttcctcgtcgttgatcttgaagacggtggccgccttgaggagttcctcgatgaggtccttggagtagtggtcgccacgcaggttgatgtcgaagaacttcatcgcgcccggcttggtgtgcttgagcagctccgtgatggtggcgtgcgattcgggggagcgcagggccagggtgccgaagcagacggcgtcagccttggagaccacgtcgatgagctggcgggtgtacaggatgtggtcccaagccacgcccttgacgatggtgtactccgggatgccgttcttcagcgcgacctcgacggtggaggtcggccaggcgttgcgctggatgacggtgttgatgccggcctcgttggccttggcaatcagttcgtcgccgagctcatcctcgccgaccgcgctgatagcccagccttcggtgccgttcttcatcgcgtggtaggcgaagttgacgggggcgccgccggctcgcttgccgctcggcagcatatcccacagcagttcaccgaggctcagaacgatcggggtagtcatggttggtttcctttcctttgtttcctttatcgggtgtttcgtatggaacatcttgtgatgtcggcgcttggtttaggagacgtcgaagaacaccgaggggtgttcgaggaattgggtcaccgccactgctgcggcaccggagaccgccgcgtcggcggacagggtggataggctgatggaagtggaggcattgatttcggggatggcccgttcggccaccgtggcgcgcacctcatcgagcagtatcgggccggcttcggacacgatgtcgccgatgatgatgtgctcaggattgtatccattgaagatggtgacgcatccgtagccgacgtatcgggcgacttcgcggacaatggcgattgacgcttcgtcgccgtcgccggctttggcgaacagggcgcgggcggcttcggtgtgggtcatatcggccgcgccgggaaccacggtgccatcggcgatgagcatgtcgtgaatggcgggggtggagcagtagcgttcaaggcagccgacgttgccgcaatcgcaggggcggccgttgacgtcgatggagatgtgtccgatttcggtggcggcaccgaggaagccgttgatgagacgaccgttgtcgatgacgccgaggcccacgccttcgccgaccagataataggcgaggttgccgtcggcgtgcaccgacgggtcgaagagataatgtgcgagggctccggcgcgggcgtcctgttcgatgaacacaggcacgcggaaagcggtggcgaattcgtcgatgaagttgattttgcgccagccctgcatgctggacaccacggcggtgcggcctacgttacgcaggtaggggccgggcaccgccatgccgatggccacaatggacgggtcgttgtcaagcagttgttcgacgcgctggtggatggtgacgatggtgtcgttgatggtgttgccgtacaccgtgggcaggttttcaaagctcagggtgttgccacacaggtcgaacacgccgatctgcaccagcgagcgggcgaatttgatgccgatgatgcggaaccgcgtggtgtcgagtttgagaccgatggaacggcggttcttggaaccttccaaatcgccggtctcttcaatcatgccggcctcgataaggcgtgcggtgattttggtgatggccgcgggggtgagttccagtgccttggcgatttgcgcgcgggagctgatgccgttgtgatacaggtgcttgacgatgcgggagcggttggattcggagacactggcttgggaagtggcatgggtggtgtttgttgccatcggtcttaagtcctccttgtctgcaccgctgcgagttgttccgctcgtctttgaatctgaacttgattaagatattaacgctgttaattgattgacgcaatcaatatgtcattcggtgtgtcgtgcatgtgagtgtcgtcttgggggaatttgttaagatggttgtcaatagtcggatgcacactgatatcaagcgaaacgttcgatgaagaacaggggaggactgatgtctgaaaacactatgaacaatctcaaaatcggtgttgacgtgggcggaacaaaaatcgaagctgtgctggttgacgcaatgggcacggtattgggttccgcccgtattcccgccaggcatggcaacgatgccgtgatcgaagacatcgtcgctgtagcacatcaggcagcgggtgagcgttttgacgaggtgagggccatcggtgtcggtaccccgggcacggtggattcggccagcgggcatgtgggcaatatcgtgaatctcgacgtggtctcgctggatatggggccgttggtctcgcagcgttcgggcgtgccggcccatgtggaaaacgacgtcaatgccgccgccgtcggcgcggccaccgtattgggcggtgcggacggcatggccggtaccattgcgttcctgaacttcggcaccggactggctgcgggcattgtcgaaaacggcgtgctgatgcatggctatagcggtgcggccggcgaaatcggccatatcccagtcgaacctcatcgcctcaagtgcccttgcgggcaatacggatgcttggaaaccgtctgctcgggcgcatccgtgggacgtctgtggcccaacgccgacccgccgatgcccgacctgattcgtcgcgcgaaaaagcgggaggccgaggccgtcgatgtgctggacatggtagtgcgcgccatcggcgacactatccagattttggcccaatccgttgacccgcgactgattgtcttgggtggcggcatggccaaaaccggtgaaccgttggtcgaggtgatcacggctgagctgcgccggcgcgaatcgcaatgccgattccttgaaacgctggacctgccggcccggctgcgtctggcacccgtcgatcaaccggtcggagccatcggtgccgccatggcggcatagcactggcatagtgccggggcatggaagatgaggcgtcggatttgtctccgagaccgcatcttccatgcggtcctatatcgctttatgtcgtgctgtgccgcgctgtgccgcgcttggccttgcgcgtttcgttgccggggtggccagctttatttggccaagtgttggaagaccacggcgatggcctcgccctgtacggtgatgtcgggtccgcattcgcagcgccggatcaccgtgtgtttatggaaggacgaggatgtggcggcatccagatattgctgggccgcgccgatgaacgtcgcgttgatgatgttcggctggccatagacgcatacgtctgccatatccaaaaggcccacaggcatggccagggcttggccaagatagcggcccgcccgagcaaggataccctgatgctgctccacgtctgctgcgctgagttgcttcttcaatgcggttccggaaatcatcgtctccaagcaaccgtgcttgccgcaagggcacagcggcccgtcaagatcgatggaaatatggccgagctcgccagccgcgtgcagttcgccgattaccggcgtgtccgagagcagaatcgccgaaccgatgcctctttcgatgcgcacgaaaagcatattcggcccgccttggccaaagaaacgttcggtgagcatggctgcggtggcgtcgttgctgacgtttacttcaagtccgaaatgttcggcgattggcgtggacaggtcgagattgttccagccgcgcatcgtggaggagcggaccacgccgttgtctaccacgccgggggaggcgactccgatgccgatgacctcgccatcggacatgcccagcatcttctcaatgagctcgatgatcacatccacggaaacgaatgagccggtgttcagggtgacttcggcgtgacgcagcggctggccgagcagattggtgactgcgccgtgcagcaggtgctcctgcgtcaggtcgatgctgatgatgcgcagtcgatcgatatcgatgctcagcagtgtgcctcgtttgcctttgccgccgctgggtgcctgaccggtctcgcgcagcaatccttcctccagcatccgaccgaccacatcggaaacggccacgcggctcaatccggtgcgtcggccgagctcggcgcgcgaatactggttggtggggaacaacaacctgaagataagttggcggttcttgcggcgcacatcggcgggggaagccttggccgcatggtcgtcggtcgttgtgttgagaccgagatatgacatgtttcctcctgcctgatggtgagcgagtggacggcgattgttgttccatacacagcttagacggtgaagcgcaatttcgtcgttgaaactgttatgaaacttcactaataaattccagtgtacctgtgtgaagcgtcaggaaacaccgtgagtgttcataaggtccaaaattgttagtatcattaacaaatagcgaatcaccaatcggcgctacgccgaacggtggttggaacgccgcgcggcacccggacgtgacaaggatgttgccattatccgcaagacgggcggcggtacagcgactcgcatcgggcgggccgcacggaactggaggaaaccgatgccggaaatcatcattgtcaagaacgaagccgaggccggcgagatctacggccgttgcgtggcggacctgatcaaagcaaagccggacgccgtgctgggcctggccactggctccagcccgctggccgcctatcaggcgctcgccaagatcgtcaaggacgaggccattgacgtttcgggcgtgcgtggtttcgcgcttgacgaatacatcgggctgccgctgacccatcccgagtcctatcatgcgaccatccatcgcaccgtggtcgaaccgcttggcctggacccggccaaggtccatgtgcccggcgacgtactcaacggcactccgctcgaagacggcgacaaagtcgcgctggccggcccggcctatgatcgtgccatcgaagccgctggcggcatcgacgtgcagatcctcggcatcggcaccgacggccacgtcggcttcaacgagcccggttcctcgttggcctccggcactcgcgtcaagaccttggccgaacagacccgcatcgacaacgcgcgcttcttcgacaacgacatcaaccaagtgcccacccactgcatcacgcagggtattggcacgatcatgaaggcccgtcacctcgtgctgctggcgttcggtgccggcaaggccgaagccatcgaggagacggtggaaggcggcgtgtcagcgttctgcccggcttccgcgctgcagatgcacccgcacgccacgattatcgtggacgaggaggccgcgtcccgcctgcgccacaaggactactaccgttatgcctacacccacaagccggcctggcagggcatctgagttatcgtgtgctggctcccgccagcgggagcgcatgagcggtaaggagaacaacatgtctgataggaacgagatagtctcgcgcgtgaccgcggcactggagggcaagccggctccggtggcgattcgtaacgcgcgcaaggtggatgcgcgcggcgaacggcgcggatattgggtcgtctccgatgccgccggcgtcatcgtggcggccggcacgggggaggagaccttcgagcactactgccgcacggtggggctcgacccggccgatcgcaacgcggtcatcgacgccgaaggccgtattctgacccccggctacgtggacatccacgcgcacggcgcatgggagaagagcttcgatgacgggccggacggcatcgacgtggcgcgggccggccacgccgtgcatggcaccacgcgccaggtgctctcgctgatcaccaaccccgtggacgtgatctgccgcaacatccgcaccgtccgcgccacaatggagtccggccgccccgacatcctaggctgccatctggaaggcccgttcctggccctggcccgcaagggcgcacatgacccggaatgtctcaaggatccggtgcctgacatcgtcgataagatgcttgaggcctccggtgccgaccccgcctccggcaagcttggctgcatccgccagatcaccatcgcccccgaactgccccacggcatctccgccatccgccagttcgccgctgccggcgtggtgccggccgtgggccactgcgacgccgactacgagaccgccaaagccggcttcgacgcgggcgcgggcatcatgacccacatgttcaacgcgatgaacggcctgcatcaccgcgaacccggtccgattccggccgcggtggaggacccgcgcgtcaccatcgagctcatcaacgacggattccacgtgcaggatccgatggtgagcctctccttccggttcgcgcctcaccgcacggccttcgtgaccgacgcgatggccgccaccgactgcccggacggcgcctacaagttgggcgcgctggacgtgaacgtggtcggcgggcatgcgcgcctggtctccaacggcgccatcgccggctccactctgctgctggaggtcgccgtgcgccgtgcggtgtgcgaactgggcttcagcccggtggacgcggtcgaggcggccactctgacgccggccaaggcgttcggcttcgaccggccgaacccggtcaccggggtgccgatcggcctcatcgcccccggcttcgccgccgatttcaaccttgcggacccggccgactggacggtcgaacaggtgtggtgcgcgggccgcaagctcaagtagcagtaggccgaccggttgacgaatggaaggcattcgtctacgaacatggtcacatggtgagatgatagtatatttgtctcaccatgtgaccgttattcacgtcgtaatacaagaatccgtaatactgctcgataccgcataaaaccggccttggtcgccacaagcgaaacataagtcgatgactatggaaacgcagaggtaacacatccgcaccatagtcaggcggtaatccacgcccgcagtgatgacgtggaaacaagttatgagagaggattcctgttgaattccaagaagattctggccgccgccgtctccgtggccgccatcgcatccctgaccgcctgcggcggcgtgaaggatgacaccgccgcaggcgccgattccggcaacgccatcaccatcggcaccaccgataagatcaccagcctggaccccgccggctcctacgacaacggttcatacgccgtgcagattcaggtgttcccgttcctgtacgcccaggactacaacacctccgaactgagcccggacatcgccgccgatgacggtacctggaacgatgacggcaccgaattcaccgtcaagctcaaggacggcctgaagtttgccaacggcaacgacctgaccgcttccgacgtcaagttctcctacgatcgcatcaagaagatcaacgacccgaacggcccgagctccctgctcgccaacgtcgaatccgtgaccgccaaggacgacaccaccgtggtgttcaaggattccgtgccttttgacgtgactctgaagcaggtcatgtccagccccgccggcccgatcgtcgatgaggataccttcgacgccgacaagctcaccgacgccgacaccatcgtctccaagaaggcctttgccggcccgtacacgctgaccgccttcaagatcaacgagtccgccgcctacgccaagaacgactcctacaagggcctgaccccggccaagaactccgccgtgcaggtcaagtacttcgccgacgcctccaacctgaagatggccgtccagcagggccagatcgacgtggccaaccgctccctgagcccgaccgacatcgaggacctctccaaggactccaaggtcaaggtcgtcaagggcccgggcggtgaggagcgcttcatcgccttcaacttcaagattcagccctacggcgaatcccagcccgacgccgacgccaacaaggccaaggccgtgcgccaggccgtcgccaacctcatcgaccgcgaagagctctccaccaaggtctacaagggcacctacaccccgatgtactccttcatcccggacggcctggccggtcacgatgacacgctgaagtccgcctacggcgacggcaacggcaagccgagcaccgagaaggccaagaaggtcctcgccgacgccggcgtcaccaccccggtcgacctcaagctccagtacaacaacgaccactacggctccgtctccgccgacgagtacgctgccctgaagtcccagcttgaggcaggcggcctgttcaaggtcgacatgcagtccaccgaatggacccagtacaacaaggatcgtgtggttaccgacgattccgacggtgtgtacccggtctaccagcttggatggttcccggactactccgacccggacaactacctgtccccgttcttccgcgatggtaacttcgtgaacaacggctactccaacaaggaagtcaacgacctgatcgtcaagcaggccggcgagaaggacgagtccgctcgtggagacatcctcaagcagattcagaagctcgagaccgaagacctctccaccatcccgctgctgcagggtgcccaggtcgccgtcaccggcacctccgtgaagggtgtcaccctcgacgcttccttccgcttccgctatgcctccgtcaccaagggctgatccagcatgagctcccctctttgaggggggagctgtctgccgacggcagactgaggggagcccaactcgtatgactcccctcagtcggcttcgccgccagctcccctcggagaggggagcctttattgctttatataccgattaccaacaccaaggagcatcgcgtgtcagacagcgccatagcgacctccagcaccactccggcgaaagccaagacgaagaagaaccgactgtcaggtagtttcttccgcttcgtgctgacgaggttccttctcattattcccaccgttttcattctggtcaccatcgtgttcttcgtgatgcgcgccaccggcgacccgatttccgccgccttgggcggccgcctgacacccgccgaactccagcagcgcatccacgcggccggctatgaccgcccgctgattgtgcaatacgtcgactatcttggcggcctgctgcacggcgacctcggcacgacgctgaccgataaccagccggtgatcagcattcttacgcactacggcgccgccacattcgaactggccttcctcgccctgattgtggcgctgattgtcggcatcggcctaggccgactcgccgcccgcaaacgcgaccgtgccgccgacgccggcatccgcaccttcgccatcctgtgctacgccaccccggtgttcttcctcggcctcgtgctgaagctcatcttcgctgtctggctcaacatccttccagcctccggccgctccgacctgaactccgaaatgcagttcacccgtctggtatcgccgactggcttctacatcatcgacgccatccagctcggcgacatgaacgtgctcgtcgacgtgctgcgccacgccgtgctgccggccgtcgccctaggcctcctgaccgccggcgtgttcatccgtctggtacgcaccaacgtcatctccacctacaattccggctacgtcgaggctgcccgctcgcgcggcgtctccgaaaagcgcctgctcaacaagcacgcctggcgaccggccctgatcccgatcatcaccgtcatgggcatgcagatcgccctgatgctcgccggtgcggtcctgaccgaaaccaccttcgaatggaagggcctgggcttcatgctgtcccagtacctgaaggcccgtgacttcgtggccgtgcagggcatcgtgatccttatcgccatcatcgtggccgtcgtcaacttcctcgtcgacgtcatcgccgcgcttatcgacccgagagtgaggtactgagatgaccaccgcatcccaagacaagatcaccgtccccggtgacgaccgccttaccaagctcaacgtcagcaccaagacgccgttctggaccaagatcccgatcatcaaggaactgcgcgtggcggtcggctggcagaagggcatgctgatcaccggtctcgcgatcaccgcgttcttcctgctcgtggccctcttcgccccgctgatcgccccctacggccacgcccagatcaaggccgccgacggcacgtccttcccggcgcaggccgcaccctccgccgaacacatctggggcaccaccgccgccggattcgacgtgttctcccgtgtggtgtggggcgcacgcaccgccgtcatcgccatcgtcgtggccgtgctgctctccatcttcgccggcgtgctgctcggcctggtctccggctactacggtggctgggtggaccgcattctggtgatgatcgccgacgccgtctactccttcccctcgctgctgctcgccattctgatggccatcatgatctcccacggccagtccggcctgtggagcggcattctggcttccggcatctccatcaccgtggtgtacatcccgcagtatttccgcacaattcgcgccgaagtgatccgcatcaaggaatccgcgtatgtcgagtccgcgcgcgtggtcggcgcctccacctggcgcatcatgaccaagcacctgttcaagaactccacccgcacgttgccggtgatcctgacgctgaactcgtccgaagccatcctgaccctcgccggcctgggcttcctcggcttcggcatcgagccgaccgccgccgccgaatggggctacgacctgaaccgctcggtttccgacgtgaccgccggcatctggtggactgccgtgttcccgggcatcgccatcgtgctcatcgtgctcggcatcacgctcgtgggcgaatcgctcaacgatctggccgacccgcgtctgcgcgcccgcaagtccgccggcgaagtggtcggatcgatcgaagacacgtccgtcgacccaaacgagaagccgaccgcacgcaacgaggtgattgccgaactcgacgcgaacgtcgacccgccggccaccgtcaccgaccatgacccgaccatcgtcgcctccgaatggaccggcgagggcaagccggaaggcaaggagtgagagatgagcgaaaacaacaagaatctcgccgatatcaaggacctgtccgtctccttcatgaccgacgccggctccatcaaggccgttgaggacgtgaacttcaccattccgcgcaagaccgtggtcggcgtggtcggcgaatccggttccggcaagtccgtgaccgcgcgctccatcatcaagctgctgccggagacggccaccacctccggtgccgtctacctgtccaagcgcgatggctccgattcgctggacgtgctctccctgagcggcgaacagctgcgcgaagtgcgtggttccgaggccgcgatggtgttccaggagcccaattcggtgctgaacccggtgtacaccatcggctggcagattgaagagggcctgcgcgcccacggcatgaaggacaagaaggaactgcgcgccaaggccatcaacatcctgaagaaggtcggcatcccggatgccgaaacccgcgtggactactacccgcaccagttctccggcggccagaagcagcgcatcgtcatcgccatggcgttggtgctgaaccccggcctgattctggccgacgagcccaccactgccctcgacgtgaccgtgcaagccgaaattctcgacctgctgcgcctcgcccgtgacgagttcgacgcctccgtgctcatcatcacccacaacatgggcgtgatcgcggacatcgccgaccaggtggtcgtcatgtaccgcggccacgtggtcgagcagggcgacgtggagcagatcttctaccatccgaaggacgactacaccaagcgactgctgggtgccgtgccgcgcatcggtcagaagctggtcgtgcgcgaccgcgagggcaaaccgatcgagcgcaaggccgattggcgcgaacagccgatcgccgtcgaggccaagaacctgaccatcacgtacccgggccatctcatgcagcccgacttcaaggccgtggacggcgcgaacttcaccatccaccgctccgaagtgctgggcctggtgggcgagtccggttccggcaagtccaccaccggccgtgccatcgccggcctgcagaaggtgtccggcggctccctgaacgtgctcggcatcgagatgaacggcgtcaaggagcgtgacttcaagcccaagcgcgcggacattggtttcgtgttccaggatccgggctcctcgttcaacccgctgatgaccatcgcggagaatgtggccgagccgctgctcgtgcaccacaagtacggttccgtggccgatgccaagaactatgtgggcgatctgctggagatggtccagctgccgcgcgcctacatgaaccgtttcccgcatgagctgtccggcggccagcgccagagggcgtctttggcgcgtggtttggcgttgaagccgtcgctgctgatcgccgatgagccgacttctgcattggacgtgtcggtgcaggccaaggtgttggagctgttcaagcgactgcaggcggaaatcggcttcgcgtgcctgttcatcacccatgatttggcggtggtcgatatgcttgccgaccgcatcatggtgatgcataagggccagatcgtggagcacggcgatgccgaccagattatgcagcacccggagaacccgtacaccaagaagctgctggcctccctgcccgtgcccgacccgcgcgaacagcagcaacaccgcgcccacctccacgagctcctagcccaagaggcgtaatcgcatagcattggagctccctcgtcagagggagctaactttatatccgctagtactgctgcccatcgaactggaacagggcgtgggcgtcgccgtgttttttgttctcgatgtaagtatggaacagctccagccgctcgctcgtgctggccgccaggggagtgggcaggtcatccagatcgaaccagccgacgctcaggctttcctcgtcgcctacgaacggctcggcattgccgccgggcttcagggcgcacaggaacgaatgatccatgtacatggtgttgtcgccattggcgtaggtcagtaccttgtttgacgaggtgacggccaccaaatcggtgacgatggcatcgatgcccgtctcctccttgatttcgcgcaccaccgtgtccgccggctgttcgcccggctcgttgatgccgtagaccatcgcccattcgcccgtgtccgaacgacggcccaacagcagttgaccatgttcgttcagtacacaaccggtcacgccattgagccacaacagatcatggccgatcttcttacgcaattccaacacaaattccggagtggacacattgcctccttagtagaaaagaagctccctcatcagagggagcttaggttacttcgcttgggcagcctgctcggccatccaggcttcgacgtcgtcgatctgcttcgggatgccggcggaaatccattcggggccgttctcggtcatgagcacgtcgtcctcgatgcggatgccgatgccgcggtattccggcggaatcagcagatcatcctcgcggaagtacaggccgggctcgatggtgaagatcatgccgggcgtgatcttcgcgccctgataggactcatagcgggcctgcgcgcaatcatgcacatcaagacctaggtggtgggccacgccgcaggcgagccaacggcggtgctgctggccttgcggggacagtgactcctcgacgctcaccggcagcagaccccaatcgtgcagacgctcggcgatcacacgcatgcaggcgtggtggatgtcggaataggtggcacccggcttggcggcttcgaaaccggcctgctgcgagtcgagcacggcctggtacagacgcttctggaagtcggtgaacttgccgttggtcgggaaggtgcgggtgatgtcggccgtgtacagggaatcgacctcaacgccggcatccaccagcagcatgtcgccggtcttcaccacaccggtattgcgcatccagtgcagaatcggggcgtgggggccggaggccacgatggagtcgtaaccgacggcgttgcccagttcacgggacacggcgttgaacgcgccttcgaggatacgctcggagcgcggcttgtcgagcgcggccggcagtgcggagagcagacggtcgaagccatgcttggtggcgtccacggccttgcgcatctcgttgatttcgtagccgtccttgaccatgcgtgcctcggcggcgaactcgtgcagcttgtcgtcggatgcggagttcttgtccggatcggcgaaaccgttggcctcgcggatggattcaaccatcgaagtgatttgcgggtcggtttcgctgaccacgcgcacgcgtacggcgccggcttcggcacccacgtccttggacagggcgtcggccagctgggcgatgtcgtgggtctcgatgccggtcatcgcctgcatctccttgagaccggcacgcgggccaacccagtattcgccgtagtgggcggacatgaagaagtcctcggtggagttgtcggcgcgcggcgccacgaacagttccggagtgtgcgtcttgccggcggcggcttcgggggagtcggggtcgaccgggttcaggaccagcacggcgccggcctcgtaatcggaacccagaccggtgtagtaggcgaacgtggtgtccgggcggaacatgtaatcgcaatcattgttgcgcaccttcggctggccggccggaatgaccagacgctcgcccgggaaggccttgcccagcgcctcaaggcgggctggcgtgaacttggaggattcgagaggattaatctccggatcatcgtcggcccagccggacttcatgaactccttgaatgcggccgactgcgggcgcagcgagcggttgttcacgcggtcgctcatcgactggttcgcgcccggtgccgtagcgcgctcttcggcctcatattccttgtccttggcggtgatcacttcacccattgccactctcctgtatgtagttgttgtcgaatcatcgattcccacctcatattagtcggctttatgcgatgtgccacgattgacggctgacggtaaaaccaagtacggaatttggacggtcttccggacatgcccatatggcgagtgcggcgggctggaatgcgggcccgtttattgttctcggtagggaaggagaggggcatgggcttgggctggagcttgccgattgatattgacatattctgtgggctgaatccatgtgaacccatgcgatgaaggtttatcgcgtcgcgggactcactgctatgcggaggtctccacctgaggcaccccggctttgatcagttttacccgcagcggagtacgttcgatgacgtcggcgtatgtgaaatggacgatttcggtggcaccggctcgtttcagtccctcgtcgcgtgcgcgttccttggccaccacctcctgaatgctgcggttatcggtcatggctgggtccacgtatttttgtgtgccgtcgtattcggccactatcacgcgcccgtcatcgagcttccatacgaaatcaacgcggtactcggtattcgtctgcgggtcggtcaccgttacctgaatacgcggcgtgaggaagcaatcttcgatgatggtgcctcgcgcgagggattctccaccattctcgctcctttcgtttgcatagcgtagcaggcggaatactcgggcataatcgattctccattgaacgcagtcggcggctatctcttccttggttattcccttggcaagggccgagtcaaagatcggcaacgcaaaccgaaaatcaaggtctatagcggcctcgaccaaggttctagccggtgatatcagggataggccggaggcctcgtaatgtgtcttcggattgttcatatcgggcatatagacatgtcgtaagcgctgatggcattgacgagatccatgatcggaagtcacgatggttatgcagccatcatgcaaatgccattgatgttcgaatccataggcacttactgccaccaagccgccaaaaacccactgaggatgctcttgcgcaagagcgcgggccatatgcaacgttcgctccggcggcgtcaaaccatcccagtatgcagtatttgcataaagactgggaatgccgtcatacactttcaacaactcaccactctgggcacggcggcgtagagcggtctgttccgcttcatttcttgaatagacgcatctcagctcattctgcgcggctgatatgagcgaggccactgctttgtgtgtcttcatgacgtcgagcgtagccggaacgaagcagcgtaagtatgaatttcagccattgtggttctagcctcggagcttggctgtcttggagcgagatgctcccgataatttcaaggtattaggccgctaattcggaatagtggataacatacaaaacttatccaccatcagtaatgtcattcgaacaacgtgctttggggattcgaacaagatatcatcggcgaaggcggatgtagctggtagagggcggcgaattgacggttaacggtgcttatgctttgtacgccgtcggtgctggttcagatattggctggcttctgtctgagtgtggaatctagcgtcggcgtgagtccaatggttgtatcgtggccgacgatttgctgcgatttattggtggcatagatccagggcttggacggctgccgacggtgagagcagtcataacagtgaatgagcctctgcgagttcaaaagatgatgtagaggacgtttgtgagagtcgtttccggggcaagacatggtcgattgacgatgttgaaatttctcagcgacggcagaatggcatgccttggcgaggaggcgacactgagaggcgatggagtcgggattaatccaggttttggccagctaccgactcgcaagagcatcatagcgtcggtgtaccgccagaagctggcactgtaccgacgctgaatagcatcagcgtcgccggacatacaagttttggattgcagccgactaagaatgggatgccgacggcaagagccgcattgcaactatatgagatggcttcactgtgcgcgctgcaggaaaaggccgcccgcgcggcggcgacatatgagacggtttcactgtgcgcgcacgataaaccaccccggcggctaggatagagggaattgagggagtgcggctccacgcgtgaaggcaagaatcccgaaccatgcagggcaaacctgtgcgaggggagcttcctgcgcatgcggaagcggaatatacgcgggcatgcgtagacatgacgagaatggcgcgaacacgtaagtggcatacgcactccgaacggtgcaacagcaacacgagcagaggttagaagagaatatgtcattcgagcatccgaatcggaacaatgagagcatgcgggacgtcgaactggacatcatgagccgcccgccggagcataacaccaccaatctggatctcgaccggatgaacctgatgctcgacatcctgggccacccggagcagtcgttccgcgtgattcatatcaccggcaccaacggcaaaggctccaccgcacgcatggccgaggccatctgccgcgcctacggtatgcgcaccggcctgtacacgtcgccgcatctggagaagatcaacgagcgtatcgccatcgacggccagcagctgtccgacgacgatttcatcgacatctgggaccagaccaaggatctcgtggccctggtggacgccaagatggaggagcaaggcaagccgaagatgagcttcttcgaggtgctcaccgccatggccatctggaagttcgccgacacgcccgtggacgtggccatcgtcgaggtcggcatgggaggcctgtgggacgccaccaacgtgctcaacgcggacgcggccatcatcggcccggtggacatggaccacatgcagtggctgggcgacaccgtcgaacagatcgccaccgagaaggccggcatcatcaagccgaactgcaccgccatcatcgggcctcagccgcatgaggaagccgtcatgccgattctcaccgaagccgccgaacgcaaccacgccatgctcgtgcgcgacggctacgaaatgaccgtgtccgaccgtatggccgcagtcggcggccagatcgccaccctgaccacgcccaacggcacttacgagggcgtgccgatcgccaagttcggcgagcatcaggcccacaacgcgcttgccgcgcttgccgcctctgaagtggtgattccggtcaatggcccgctggacggcgacttggtgggcgaggcgttgagctcggtcaagattcccggacgcatcgaacagatccgcacctcaccgaccatcattctggatggcggacacaacgtgaatgccgccgaagccctacgcaaggccatagaggaaagctacgacttcaagcagctggtcggcgtggtcgccatgatgcgcgacaagcaggtcgaggaatatctgggtgttctggagccgatcctgagctccgtggtggtcaccgagaactcgtggcgcgagcgtgtgatgccggccgatgagctcgagaagattgccgtggacgtgttcggccgtgaccgtgtgatcaaggaagcgaacctgcccgacgcgattcagactgccgtcaacatggtcgatgccgaggacgagctgggcgtgggctacggccacggcgtgcttatctgcggcagcttcgtcaccgccggcgacgcacgcctgatgcttgaggaacacgccagccccacgatgaggcaggccatggccgtccatcagccggcggtcgacccggacgattcggatcagccggcagacaaggccgaggatgaggccgccgacaacctcgaggattcggtgagcccggacgacttcgacgtgttcgacgtcctcggcctcggtaaggaacaggccagtgacgccggtaacgccggcaccggcacggccagtgccgacacaggcaccgacgattccgccgacgtccggtaacccgcatccaaggcacatcggatacccggacgcccgacatacggaaaacagtctcacgccatgtatctcaaggaactcaccctccgcggattcaaatccttcgcctccgccaccacgctgcgcttcgagcccggcatcacggcggtcgtcggccccaacggttcgggcaagtcgaacatcgtcgacgccctgacctgggtgatgggtgagcaaggtgccaaaaaccttcgcggcacttcgatggaggacgtgattttcgcgggcacgtcctcccgcccgccattgggccgtgcacaggtgagcctgaccatcgataattccgatcacacgctcgatatcgattacacggaagtcaccatatcccgcaccatcttccgcaacggcggctccgaatacgcgatcaacggctcgcaatgccgtctgctcgacattcaggaactcctctccgataccggtcttggccagcagatgcacgtgattgtgggtcagggacgattggatgcgattctgaaggccgacccgtccggtcaccgtgcgttcatcgaagaggccgccggcatcctgaaacaccgcaagcgcaaggaacgcgcgttgcgcaagttggccaataccgaaacgaacctgagccgacttgacgatttgctgggggagattcaccgccagcttggccccctcggacgccaggcacgtatctcccggcgcgccgacgcgattcagatatccgtacgcgacgcccaagctcgtctgtatgccgaagacgcccaacgttcgatgagccgccgcgacacggtacgtcaagagcttggcgatgtgcgtaaccagctggccgtcgcccagcgtgaactcgcccaagtcaaagtacgcatcgaacaggccgaggcgttgagctctgaatccagtccggccatcgccaaggccaaccaatactggcatgaattctcgcagacccgtgaacgactgaacgctctcgcccagttggccgaagagcgtagccggtcattcaccggccagatcgtcaccaacttcggtgaggatcccggcatactcgtcaaacgagccgaggaactggagtctcaggccgcggcacaaaccaaggccgtggccgatgcgcgcatcgcacttgacaaggccaccgaggaacgcgccgacgacgagaagaagcttgcctcagtccgtcagaccttgacggaactgcgcaaaaccgcacaggagcgcgatgcgcagatcgcccgactgcgcgaactcatcgcccgcgaggaatccgccgtgcaactggcgaccagccgcgccaaggattacgcctcccaacgtgactcgctgacttcccagcgcgacgatgcccagcaacagctggacgcattgcgcagcgaagcggactccattgccgacgatgacggtgccgcattggacgccgcgcgtgcaacgctctccgaatgccgcgaacgactgaacgaactcgccgataagcagcgcgagatacagtccaagatcatctcgctcaaatccaaggccgatgcgcttgccgacacgctaggcagccgcaatgcctccggatcattggaacgcgacacggacgtggcctcgcttggccgactcaccgacttcatccatgtggccgaaggctgggaagaagccgtggcccacgcgctcgaccagtatgccagcgccatcgtggtacccgaggcaggcaacatgttgcacgccctcgaacgcgctcgggaagataagctcggcaaagccgtggtgctgaccgcgagcattgccggcgatcccgccacagagccgggcacggagtcggaggagagtagcgccgagaacacggcggccgccccgcgatcgggcaacgcgctggcagcactcgtcaccgcgaacccggatgcagagaacccggcacaggccgaagctgtcgtgcacaccgtgcgtctcctgctggctgatgtaacagtggccggcaccgccgacgaagcacagcacatcgtggcatccggcgaagccatgcgggccgtcaccaagaacggcgagaccttcacacacggcgtggcggcggtcggcggctcttccatctctcaatcggacctgtctttggccgcacgccgagacaaggcattggcacaggtcaaacagttgaccgcccaagacggcggaatggctgagcaagtggccgaggccaaagccaaacgcgatgaagcggcccgactcgtcgatcaggaatccgccaaacgcaccgaagcccggctcaaagcccaacaggcggagaaatctctgaaatccgccacggatcgcatcgcatcgttcacccgtcagctcgaccagctggataggaaaatcaccgagacgcaagagaatcgcaacgagcatcagcgcaagctcgacgatctcaatcgcgctttggcatcggcccggcaatccaccgccgaacatgtcgatttcgacgaactcgatgaacgtgaacgcacgctggagcgcggactgaacctgactcgcgagcatgaggtcgccgcgaagatcgcgtggaccgaggcaagccgcaaaggggagtccctgagccgacaggccgggctgctgcgggacaacgccagagaagccgccgaacgccgcgcccgcatcgaggcgttgaacgatcgcagacgcgagcaggccgcacacctgcaaggcgtggccgatgacgcgcgagcagtggccgccatggtggaacatacgctgcatgacgtggccgccaaacgagacgagctgcaggccgccgcctccagccatgacgaggaactcaaggccctgcgcgcgcagcgcaaccagatcgagcccaaggtcaccgatctgaccgggcgcgaacatgccttggatgtaaaccgcgaacggttggccgccgaatccgggcagctcatgcaaaaagtgtccgacgaactcggtctcactttggaggaattggttagtggctatggccccgaacagccggtgcccgtgctggatgatgagggcaaccctgtgccgttggatgagacggaagctgaggctgagaccgaagagggagaaaccgggggagagaccggcaccaacggcgattccgccctctttaagaccgtgccgtataaccgtcaggagcagaagaagcgtctcgataaggctcgccgcgatctggccgcactcggcaagatcaaccctttggccaccgaggaattcgaagcgcttgaggagcggaacaagtatctcaatgatcagcgcaacgatgtggtcaaatcacgtgacgatttgatgcagctcatcaaggatctcgattccacgatggtccaggtgttcaaatccgcgttcgacgataccgccgaggcgttcgagcagatgttcgccacgctgttcccaggcggcaccgggcgactgcgcctggaaaacccggaagacatgctcaccaccggcgtactggtcgaggccagcccggccggcaagcgcgtcaaacagctgagcctcctgtccggcggcgaacgttcgctgaccgcgctggcgctgctgttcgcgattttcaccgcccgccccagcccgttctatgtgatggacgaggtcgaggccgcgttggacgacgtgaacctgacccgtttgattaatgcgttcaatgagctacgcgcccatgcgcagctcatcatcattacgcaccagcaacgcaccatgtcgattgccgacgcgctttacggcgtaaccatgagagccgacggcgtaacagccgtggtgagtcaaaaactcgaacgataaacgaatggttcccgctggcaggaactggtaccacaggtgacagagggcggtccatatcgaaagaccgccctcagtctcgcttcgttcgacagctcccgccagcgggagcggggaggtattagcgcaatgccttgcgcacgccctgtacagtctgcagagtcttgtagaagaccttcttgatgggtacgtcgcgggcgggggccaccggggtgatttcctcggtgaacttgcacttgaactcgttaagccccttgagcgacggcgcgaaatcggagccgatgcccatcagatcgtattcagtaataccctgcgagcccaggatgcagcattcggaatacagcagcttgtcggtcacatgcagacgcataacctcgttgcgcatgccggcatagtagcgcaccgcatgcgtgccgttcacggtgacaatcgaccatgccaccacacggtcttcaatacgtgcggcgaacacacggcaatgatcggcacccaacgcgccgatcatatcggaatagtcgctcatcggagcaggcgtgaatccatcgcgctggccggtctcgaccatcacatcgtaatattcggagaaatcggccagcgccttatccgtctcatcggcaacctcggccgggcactcgcgcagagacttgcgcacgtcacggcgtccacgacgcttcatccgagccagaatctcatcatcgccaccggtgatgtcgatgaccacggtctggtcgtacggcactgtggacagcaccttctccgtaccatcggcgaaccaggtgtcgatacgcaggaacgcgatgctcttgtcggccttcttgacggtgtccacgatggcgtcgacgacctcgcgctcctcagcctcggtgggcttggcgacccacgccggcccatgcatcgagcgcagataatgataaccgtgcgtctcaaaatcgataaaggagatcacggcgaccaattcaccatcacgcttgatcagataattgccccatggtgtacgtccgtcgatatccgcctgaaaaccagaccaaaccttggtctgttcgataggcaacgtgatgccggccttctcggcttcggcttccagtgtggctccgtcaactttctccaacgtgatcattacgattcagctatcctttttcgtttgtatccgtatgtcgtgtttctggtttggtcgtattgcgcgtgatctgatgtgagctaatcgggatccgatcaggatttgattggccggaatcccgtcacaagccaaacatgcgttcgacgacgtgatcgtcgccgtcgaacggcacatgcttgcgatggtccttgatccaacgctcgttgcccttgccgatgatcagcaggatgttgaatcggtcggcgtgcgcacgggcatcgtaaatggcgttggtgatggccgtcagacggtcggaaatcaccgtggagaccacatccttgttcgtgatgtagccttgcatttccatgcagatgtcgatgatcggctcggtgtccgtatcttcggcggtgaaaatgaagttcgcgatacggttctcggcagcctcgacgatttccttacgacgatcgtaggccttgttgccggccgatccggtcaccagcgtgatacgcgggttttcctcgccccaacgctcgtagacgaagtcaagcagcgcggtgacggatgcgtagttgtgcgcataatcgacgatggcgagcgtgtttgactgcgggtcgcggaactgttccatacggccggcgatacgtacggattcgatggcgtgcagtgcgtcggcgtcatcgagcgatacgccaaccgcatgggcgatggcgatggctgccgccgcattgaggtagttgaagtcgccatcgatggacagatggtagtcgccaagggcctgatctccgtcggcgatgtggaaggaggcgtgcgccgggtcggcgggccaggcgacgacgtccgcactggtgccggcattatccgcgtcatgcagggcgaaggtggtcacgccgatgccggctgcctccgcgtcctcccgcaacagatcggcgtgcagactgtccgcgccgagtaccagcgacttcgcgttgacgatgatctggcgcttgcaatacaggtaatcctcgaacgtggggtgttcgatcgggctgatgtggtcgggggagatgttgaggaacgcggccacatcgaaagtcaggccatagacgcggtccaccttgtacgcctgggaggagacctccatcaccagatacttcataccgttatcggccgcctcgcgcatcatgcggaaggcgtccatcgattcgggtgtggtcagatcggattcgacgtaggtgtggccgtcaaggcaattatcgaccgaggagaacaatgcggccttgccgccggagacggcgttgataagcgcctgcgtgaagtacgaggtggtcgtcttgcccttggtgccggtgacgccgatgaccgtgagctcgttctgcggatatccgtagaacgcggcggacagcaggctcatcgccttacgtgcgtcgttgacgatcaggccgggggtggcggttgcggctgagtactcggtttcggccacgtatgcggccaggccggcttcgtcgatgccgttcagatattcggccttgaactggcccttgcagcacagcagggtgcccggcgtgaccttgcgggtgtcgtaggtgatgccggcgaacggctcatccgccgaagcgatacgggccgggtcgtcggtccagacatccccttggatgatttcacgcagcagatggtgttccttgagcaggtcagcggccgaagccaaagtcaaagccataattgttactccctattatctagccgatacgccattctacaggtggggtgcagcgtgttgtggctcacacgtcatcgaccacgatatgggcacatgatttgattagaatggtgaaacgtgacgacaagcgaagcaactatgcaatccgggcagtcagccggatcgggcgagtccatggcagccaagcgcgccagatttgaacagctcgccatgcccgccgtcaatgcactgtaccggcaggcgatgaggctgaccaacgatcccgatgacgcgcaggatctggtccaggacaccttcgaacgcgggttcaaggccttcgactcattccagccgggctccaacttcgaggcgtggatgaccaccatcgagcgcaatgcctacttcaaccagtatgccaaggccaagcggcgcccgcagcgtgccaacgactccaccggtgaatacgacgactgggacatttacgatgccgccgaacatacgtcggacgggctcaagtccgctgaagaggaatatttggacgccttcgcgcccgaggaaatcatggccgcgctcgccaaactctcgccggaacgccggcaggtgttcatcgacgccgccatcgacggcaagtcctaccagcaggtggccgatgagcagggcgtgaaaatcggcacggtgatgagccgcctgaatcgcgcccgcacgcaactcaagcgtgagctcgcctcgtatgcgaaagagcgcgggtacgtgactggttcgtcggctggttcaccatccgcgaagttgggcgaaaacgttggtcgaatcgccgattccggccataatggaagtagtgaacaaactgttggtagcaatggcgacacgcaagccgcagtgagacatagtcatgcgactggcgcccgcacgccacaacagtcaagcaagctttcgggaaaggagatctgatgaacgatcagccggtagagcgtactcgccatatctccataacccgtacgggggccgatggcatggtcagccagaccgaagtgcatatcacggcggtgcatcatcgttcagtggataccggctcggcctctgcgtcggtccaggcggacgtgcatatcgttacggagggcgactgttttgacccccgtacctgctgcgacgagcgtgaacaggcgttgattgccgcgttgcgtgcctacttgcgcccggatgtggcacccgaatgtctgatagcccggctcaaggccacgcttgatcactgctgcggcgaagataagtaacgacatatacaacaaggcccgtctgatgtatcatcagacgggccttgagcgttctataagaaacgcgaagaatcaggcgttaggacgcttgccgtggttggcggccttcttacgacgatccttgcgcttacgtccgcgcatgcccatgatggactcctttgctgcagtaaaaaaataagccttcggaattatgccacatgagcacgacgtgatgcaacacgggtgtccatgtggcgatgatcgtcaggcttggttattcggtttttcagatttgttcggcgtggaaggtgaccacggtggtgtagtcatcatccggctcgagcacaaccagatccttgccggtgcggaaggcgtcggcgtaggcggtcatcggttcgacggccacgccggcctgacgagccttctcgccgatttcgttgccggtgcacacctgccaggagttgatggtcttgtcgccagtcagcgtgaccttgatgccgtcggggcgggtgaacacggcggaagtgctgccgtcttcaccgcggttggtgatatcggtccaggcatcgtcgaagccacgtccctccagcgtggggttatcgcgcaggtcgaagatgccggaaaccggctcttcaccggtgggcagcaagtgttcgtctacggtcacgtgggtgtcgcagtgcagctcaagacggcagggctcgttgtcggcggtaatggcctgaccggtggcgtgcttgccgttggccagccacgggtggatgccaaatgcccacggtgccttcacgctgtcgttgttgtgcacggtgaaggtttccgtgagaccgttctcgtcaagtgcataagtggcggtgatggtgatatcaaacgggtagccggcgatgtcgggggagcgccaggagagcgtcacgtgtgattcctgcaaatcaacgagctcccacatgtagcggtaggcatagccgtgcagggaggattggcggtcgaactcgtcgatcggcatctggtagtcttcgccatcgaaagaatactgaccattggtcactcggttcgggtacggtgccagcacccagccgttgcagcagggaatgaccttgttcgggtcgaaggggacgatgaggtcttcgccgcgccacttcagctcgcgcaggctggcacccagttcggtgacgacggcactccattcgccggacgagatgacatattggttaccagtgcgaggcttcaaagccatagtgcacactcctttgtggaacaaattgttatcgctcacaatcgtatcgcataagtcccaagacgcggcggcacataaggataaaaaattggctcccctctggaggggagccagcgtaacagaactacttctggactacttcgtagcggaccacagtggtgtagtcgccgttgggggcgagcgtcaccaagtggtcaccagtgcggaaggcattggccggggcggtcatcggctcgacggcgatgccatacggatgctcggcgaacggtgcgccagtggcggtgtagcactgccaagcattaatcgtctcatcgccaatgattttcacttcgataccgtccgggcgggtgaatgtggtggtggtcgtaccatcggcggcacgctccacgtcaacccaggcatcatcaaaggcgcggccttcgagcgtcgggccatcgttcaggtcgtagataccggtaaccggttcggtgccggtgggaatcagcgcctcgttcaccgtcacatgactggcggccttaatctgcaggtggcaggcggcggagtcggcatcgcgttcggcggcagttgcgccctgcttgccgttggccagccacggatgcaggccgagagcccacggtgccggttcgtcgccatcattgcgggcattgacggtcgcggtcatgccgttgtcgccgagttcgtaggtaacggtcacggtcacatcgaacgggtatccgtccaagttggggaagcgcagcgaaagcgtcacggcgctatcggtcaacgattcaagcttccacatgtagtggtaggcgtatccgtggttcgcattgttgcgcggtgcgggatgatattcgttaaccggcgcgcagtaatgcttgccattgaaatcgtattcgccgttttcgatgcggtttggccacggggccagcacataaccgttacaggtgggggtcaggtcgttgacgccgaacgggcagaaaatttccttgccttgataatcgaatcggcgaatcttggcgccgagttcgcagatgacggcggaataatcgccatagtgaatcgaatactgatttccggtgcgtggtgttttactcgtcatggaatcactcccgtagtgaggttggtgggccggtagctcctgctatcgctggccccagtctagcgcgtctcctctatcgaggcggggattggcgatatgcggcatataataaacaattcgtataaacacggtagcaatacgtggagtgacgagtctcacaccatcatgcgagaagcacgtggattccttggaaaccggtgatttgtgggagacgcggaaaagttgtgacggcagattcctgtaatccctgccttacactggaaaacactattgacgttcaggaggttccgatgaccaaaagcgttgtgctcgctgatccgcgaggcttctgcgcgggtgtggaccgtgcgattcttaccgtacagaccattctcaaagccgcggaggcttccggaaagcggacgcgcgaggatgggctgcccccggtatatgtgcgccggcagatcgtgcacaacaagcatgtggtcgaggacttggccgggcaaggcgcggtgttcgtccaggaattggcggagattccggatgctgctgcccaagcgggtattccggtggtgttttccgcccatggcgtatctccggtagtgaaggcggaagccgaacgtcgtggcatgcatgtggtggatgccacctgccctctggtgggtaaggtgcaccgtgaggtgctgcgtttcgtgcgcgaggggtatgaaatcgtctatatcgggcataaaggtcacgatgaagcggtcggtgtagtgggggagagccccgaacacgtgcacttgatcgagcatgaatcggatgtcgattcgctggattttgcgcccgacaccaagctggtgctgctctcgcagaccacgttgagcgtggacgagaccgccgataccattgccgcgctgaaggccaaattcccttggattcaagagccgccgagttcggatatctgctatgccacgtcgaatcgtcaggctgcggtcaaactggtggcccagcagtccgattgcgtggtgattgtcggatcggccaactcctcgaattccgtgcgactgatggaggtggcgcaggagggcttgggggagcgcggcaaagcgtatcgcgtggatgatgccagcgagcttgacccggcatggttcgagggtctggaatccgtaggtatctcctcgggtgcctccgtaccggacgaactggtgtccggtgtgattgacgctctgcaaaacttgggtttcaccggtatgaagtccgtcgaaaccatcaaagaaaacatgcactttgtgctgccggcggagttgcgcaggaagaagtagtcattcttggctcccctccgtgaggggagccaagaacggtcaccacgtgccgattggtgcggcaacggcgttcaagaccttgagcaggtcctgtggattcacgcccacagacaggcctcgcttgccgccggagaccagaatttggtcgaattgcagggcgctttcatccaacacagtcttatgacgtgtcttctggcctaacggcgagatgccgccaaccacataaccggattcacgcatcgccaccttgggatcggccatagaggccttcttggcacctacggctgcagccaaggctttcaaatccatatgaccgctcaccggtaccacgcccaccacgcgttcggcaccggtgtccgccatcaacgtcttgaacacctgatgctcgtcgaagccgagcttggtggccgcctccacgccgtagccgtcatccatatggtcgttggagtgctcgtattcgtatacgtggaattccacgcccgccttctccagttggactgtcgccggagtggaacccgcgcccttatcatgcttgcttttctttgccatgattaccgttctactacgaagaaacccccgcacaaggcgggggtctcacagcttagttctcaaacgaaccgtagcggcctagaccgcaatggttcactcggagatctcagcgaagtacagcagggtacggatcatgttggaggtgaagccgtactcgttgtcgtagaaggacacggtgcgagccagggtcacgccatcaatggtgttgacgtcggtctgggtcgggtcgaacacgccaccgtgggtgtcgccgaggatgtcggaggagacgatgccctcatcgttgtagccgtagtaatcggtgtcggagaaggcagccttgaaggcggcgttgatctcgtcggcggtggtctcggtgttcagaacggtggtcagctcggtgacggagccgtccggaacctggacgcgctgggcgtggccctgcagcttgccgttcacggacggaacgaccttgccgatggccttggcagcgccggtggagtgggcgatggtgttgatggcggcggcgcgcaggttgcggccggtcttggtgccacgcgggccatcgagcagcatctgggtgccggtgtaggcgtggatggtggtcatgaagccggccttgatgccgaacttctcgtccagcagcttgaccatggcggccatggagttggtggtgcaggaaccggcggagacgatcacgtcggaagccttgaggatgtcgtggttcacgccgaacacaacggtcggggtggtgtcatccttggccggggcggagatcaggaccttcttggcgccagcgttgatgtgagcctgggacttctcggcggaggtgtagaagccggtgcactcgagcacgtactcaacaccgtcgttcttgacccacggaatgttgttggcgtccttctcggcgtagaccttgtattccttgccgtcgacgatgatggagtcttcggtggccttgacgtcaaccggagtgccatcgtcatgacggaaggtgccgtgggtgctgtcgtacttcagcaggtaagccagggtagccggggtggtcagatcgttgatggcggcaacttcaatgtcaccagcctggccgccgcgagcctgcagctcgaagatgcgacggaaggcgagacgaccaatgcgaccgaagccgttgataccaatcttaactgtcatgtaattctcccttgtagggtggccttggcgcgctttggcacaccgggccattgtttaccaacagttgctactgtaatgccgactctgtacacatggcaacgtttcagcgtgcgttttgggcaaaaatgccgtattttctgtgagcgctcacaattcggattgcccgcaaccgacatgtgatttttcctctcctttggaggaatgtctcgaatcatcatgagcaagcgcgcggcatgcaagtcagcgaaccagcagcttggacactgcggtgtccagctcgccgatatcgccgccaaattcgtggaatcgactcacctgaggcaacgccacctcgatggggaaggtgacgatcagtgtgccgtgctccacgctgatggccgcgtccacgccgtcgcggaactcgttgcttaccccctgcaccaccgtattggtcagcgtgccgtctttaagctcatatttcagccccggctcgttcacgccaagcgaaacatcggagtgggagaacgcagacaccatgcggccgtcctcgggcaccggatgcgcggggaacgaaagcctaccatcggtgatggccgtgacgatgagcccatcaccatacagatacccgcttgccccatgccgggccaataatgccatcagttgaatgccggaaatcgtatggtcaatgcggccgcccaaaccgccatagacatggaattcgcggcaacccgccgaccaaccgaccttcagcgcggagagcatgtccggatcgtccttcagcgcgggcagcgcgatggtgcgcacatcggtgcggggcggccggccctccagcgaatcgaagtcgcccaccaccacatcgggcacgatacccaactggcgcgtatggtcgagcccgccatcggccgcaatcacatacgcgccggccggcaccacgggcgtgcccgcatagtattcgcccgcaccaaaaatcacgcatacctgagtcatgatgcctactgtagccggtatccacccatcggccgggaaaatgctgataggctacgcatcagaacagtagtcgataggcgcacaggcaggggagcggagcgatggcacagatcaccgaggcaagcgaacggccgattctcaaatcaaagatattcctctacatcaccgaattcttctccggcatgtccgctgatctacttcatctcgatcaaggccaagcgcatcgcctgcgtggtcagcgccgtgatcttcgtggccacgtcctgcgtctcgcccctgaccggcttcgcgttctgggaaaccaacctggcctatgagggcgagtccatctacaactacctgcaggtcaagaacctctccgaccgcacgatcctgtccaccaacgtgctgttcggcgtgcagtccgtcacgatgaaagacaaaggactgacaggtatgtactacgacacggccctggctgcgccggcgctcgccgacaatgccaattccgcgctgatcctcggcatgggcaccggcacctacgcccgccagctgaagcagtattatccgaaaatgaacatcaccggcgtggagattgaccagaagatcaccgatctggccggcgaatacttcgatgagcccgccgacatccccgtgaccacgtatgacggccgagcctggctcgccgcctcgcatgacaagtacgacgtgatcatggtcgatgcgtatcaggacatcaccattcccttccagatgagctccaccgagttcttcaccatggtcagagagcacctgaaccccggcggcgtgatggtggtgaacatgaacatgatctcggacggccaaggttcgatcaacgaggcgttgagcgataccatcgccagcgtgttcggcaatgggaacacactgacggccgacgtgccgaacaccacgaaccgtgaactgttcgccaagaagccgggttccggctccgaagagaactccatgcagcaggcctccaaggcgctcaacctgcgtgagaccacctacgagcgcaccggcagcgaagatctcgaatggtatatggaagaggtcgcctctcgattccggaaggtgaacgaaccggactcagcgtcgactattctcaccgacgacaaggcgccggtcgaagtactcggcatgcatgccatcgatcaaatcatcgccgatgaggccggcccatatcggcagattctcaaagacgaaggcttcggcggtctgctgcgcgccgtgcagtaggttcgacacacggaccgcgaatgtccgggcatgtggtaaacttcctatttggcttgaggaatcaagaaagcggggcaaccccacctggaagcctttcaaggcctcgggttcaaggcaaacagcctagcgattgcgatatacaacgcgcagtcaggaatgacgcaaagaactgatatgcgtctgcagaagctgagcgcatattggcgcgggctttggcttgccatgaacccaaagcattgaacaggactccagcaaaggccctcgccacggaattgaagtagaggattggagtcatcatcagcgacgaaccacgtattaacgacgagattcgcgtcccgcaggtacgcctgatcggcccgaagggcgagcaggtgggcgtcatcgcgacttccgtcgcgctgaacctggccaaggaggcaaacctcgatctcgtcgaggtggccccgaacgcgaagcctccggtcgccaagctcattgattacggcaagttcaagtacaacgagaagatcaaggctcgtgaagctcgccgcaaccagagcaccgcggaaatcaaggagattcgtttccgcctgaagattgacgaccacgatttcgacgtgaagaagggccatgtgacccgcttccttaacggaggcgacaaggtcaaggtcaccatcatgttgcgcggtcgtgagatctcccgcccgattggtggcgtggaactgctgcagcgtctggccgacgatgtcgaggaatacggcaccgtcgagtccaagccgaagcaggagggccgcaacatcatcatgacccttgcgccgaagggcaagaaggtgcacacccagtccgagcagcgtcgtcgtggcgccgagtcccgcgccgagcgtcaggctcgccaggcggctcgtctcgcggccaagcaggagtctcaggctcaggccgcggccgacgcgcagtccgcgatttctcagaagacttccgacaagaagcaaaccagcaaggagggcagcaatgccgaagatgaaaactaattccgccgcttccaagcgcgccaagatcaccggcaccggcaaggtgaagcatgtcggttccgccatgcgccacaacctcgagcacaagtccgctcgcaagcgccgtgaactgtccgccgacgatgtgctgcgcggcggccaggccaagaagctgcaccagcttctgcagaagtgagcatagggcttacccggaaataacaagactttagaaagctgaggaatagattatggcacgtgtcaagcgcgcagtgaacgcccacaagaagcgtcgcgttgttctcgagagggcttccggctaccgtggccagcgctcccgcctgtaccgcaaggccaaggaacagctgctgcactcctttaactacaacttccgtgaccgcaaggctcgcaagggcgacttccgcaagctgtggatccagcgcatcaatgctgccgtccgcgctgagggcatcacctacaaccgcttcatccagggcctgcgtctcgccggcatcgagctggatcgtcgcgctctggctgagatcgccgtctccgacccgaacaccttcaagaccatcgtggacgccgccaaggccgccctgcctgaggacgtcaacgctccggttgaggcctgattgcttgaagtcgtgacttcacactagaaaccccgcttccgagcggggtttcctattattagccccctctgacgagggggctcccgcgcagcgggtgggggagagaacaaactcatgaccaacggattcaccagactcaccgagcagttcctcatccacatcggcgtggagcgaggactcgccacggccaccgtcaccgcctacgaatccgacatcgccaaatacattgattggctcgaaacccgcggcatccacgaaccggacgccataaccaaacaagacgtcgaagactacatcgccgcccttgaccaggcgggggagtccgcccgctccaaagcccgaagactggcctcgatccacgaattccaccgtttcgcgctcggtcagcacgcggtgacggcggatgtttcggccgcagtcaaggcgcccaaaggcgccagcaccctgcccgacgtactcaccgtggacgaggtaacccgtctgctcgacgcggcggcagtcggcggctcaaccgatccggtggtattacgggacaaggccctgctcgaattcatgtacgccaccggctgccgcgtctcggaagccaccggtgcgaatctggacgacatcgacctggacgagcacatcgcgcgactcatgggcaagggctccaagcagcggcttgtgccattgggcagttacgcatgccgggccatcaccgcatacctcaatgcggggcgtggcgagttggaacagcgctccagcgccaagattcccgagaggcgcgcactgtttctcaacaaacgcggcaagcgcatctcgcggcaatcggtatgggaaatcgtcaaagcaaccggggagcgggccggcatcaccaaaccactccatccgcacaccttgcgccattcctttgccacgcacctgatccaaggcggcgcggacgtgcgcaccgtgcaggaactgctcgggcacgccagcgtgaccaccacgcagatctacacgcacgtaagccctgaaaccctgatcgaaacgtatctgacctcacatcccagagcgcggtgagacacaccattttgcgacgcgtccgcccatagcggaatcgcggcgggggagcaccaaagtcggccggaaattcaaggcgtgacaatacagtacataacagcgaaccgtcagccaggaagaggtattcatgctgcagatcaaatcgatctcgaagcgctataaaaccggtgatttcgttcagcaggcgcttgacaaagtcagcctgaacctacgcgacagcgaattcgtcgcgattctgggtccctcgggttccggcaagaccaccttgctcaacatcatcggcggcctcgaccggtatgacgacggcgatttggtgatcaacggcatctcgacgcgccaatacaaggatcgcgattgggattcgtaccgcaaccacaccatcggcttcgtgttccagagctacaatctgatccctcaccagacgattctgtcgaatgtcgaactcgcgctgacgatttccggcatcggcaaggccgaccgtcgcgaacgtgcgcgcaaggcgctagagaaggtcggactcggcgaacacatcaacaagaagccaaaccagctgtccggcggccagatgcagcgcgtggcgatcgcccgcgcactggtcaacgacccggacatcgtcctggccgacgagccgaccggcgcgctcgattcggacacgtccgtgcagatcatgaacctgctcaaggacgtggccaaggaccgcctcgtggtcatggtcacccacaaccccgaacttgcggaacaatatgccacgcgcatcgtcaacctgcgcgacggcgtgatccgctccgactccgacccgttcgtcgtggacgagacggccgaacagccggccgtgtacaagacgatgggccgcgcgtcgatgtcgttcgccacgtcgctggcgttgagcttcaacaatctgaaaaccaagaaggcgcgcaccctgctgacctcgttcgccggctcgatcggcatcatcggcatcgcgctgattctatcggtgtcgactggcgtgaacacatacatcagtgacatccagcgtgacacgatgaccgcctacccgatcaccgtcgactcccagaccttcgacctgagcagcatgatgggcggacagatgggcggcgatgacggatacggcggcaagacgcacaaaaccgacggcatctacccggacgaccgcagcgtcaagcaggcgtccagcctgaccagttcgattaccgaaaacaacctgacccgcttcaagaaatacctggataattccaagagcgagattcaccagtatgtgggttccaccggcatccagtacacatatgacgtgaaattctccgtgttcgaccacgaccccgacggcacgctggtcaatgcggacggcgtgacgatcggatccagcgactctgcctcgatggcctcgcagatggcgtccacaagctcgtccggcatgtccggcacctcgtcgatcacctcgcagcagatgtcgatgctgaccggcaaaaccgatgagaacgccgcgcccgactcgttcaacgagatcatgccgggagcggacgacagcaagctcgtaggcaaggttatcaccgacaactaccaggtggtcaacggttcatggccgaagtccaaggatgaagtggtgctggtgcttgacgacaacaacagcgtgccgctgaccacgctgtacgagctcggcctgctgcccgcctccgattaccacgagatgatgtccaagctcaacgccggcgacaaggtcagcactccacaagacaagatcgactatgctaaggccctcgatcagacgctgtacatgattccggcatccgaccagtacgtcaagggcgatgacggccactaccgtttcatcggcaacgacaaggacgaaatcgaacagcgcctcgaaacggccaccaaactcaaggtggtgggcgtcgtcaaggcgaagaaggatgcttcggccacgccgttggccgctggtgtggggtacgcgcgcgctctgaccaatgatttgatcgaccgtgcggcctccagcgccatcgttaccgatcagaaggccaacccgaacacgaacgtgctcaacggcatgacgttctcgccctcggacgatgccaccaaggtggccgacgcgcgcacctacgtggcttcgctgggcgtgacgcagaaggcgaacatggccaagtcgatgatgagcgccgggcagcagtccggcacgggcgcatcggacgccgctggtgctggtgctgcaggtgtcgctggcgcggcgggtgccggcgatcaggccgccgccatggccgcgatgagcgaacagcagctcgccgacagtttcgacgcgtatatcgccacggcttcgaacgacgtgcttgtcgcgatctacgaccagtacgtgtcgaccggcacctacgacgacaacctcgccgcattcggtgtggtgagtcgtgacgcgcccagctcgatcaacatctacgccgacagcttcgaagacaaggaccacatcgccgacgcgatcaccgactacaacaacaccgtctcgaagaaagacaagatcacctacacggattacgttgggctcatgatgagttcggtgaccaccatcgtcaacgtgatttcctacgtgcttatcgcgttcgtgtccgtctcgctgatcgtctcctcgatcatgatcggcatcatcacctacatttcggtgctggagcgcaccaaggaaatcggcatcctacgcgcaatgggtgcctcgaagcacaacgtatcccaggtgttcaatgcggagaccggcatcatcggcctatgctccggcctgttgggcgtgggcttgaccgtgctgctcaatattccgatcaacgccgtgctacaccacttcatcggcaatgcggacgtcaatgccgccctgccggtgaccggtggcgtggtgctggtgatcctaagcgtggtgctcacgctgatcggcggcctgattccctcgcgtaaggcagccaagcaagacccggccaccgcactgcgcaccgagtaagcgcatcgacatagtacgagacgagatccataaacctcggaacactggaataccagcggcaaaacggtgttccgaggcgagcccggcgagtacattaggatgggcgagcaggtattcccgacaaagggggcgagggcaacgatggacgactggcgagatacccgcgataaagacagcgcattccgtcaaggaacgctgcctatgacaggaacgtatgtcgttgcacccccagcgaacccggatgttgataaggtagacagtatgcctaccgatttgcttggacgtgaatacgaaaccttccccgcacccgaaccgctgcaacagcacggtccggcgcgtgtcattgccatgtgcaaccagaagggcggcgtaggtaagaccaccagctccatcaatatcgccggtgcgttggcccagtatggccgccgcgtgcttatcgtcgatttcgatccgcagggcgccgccactgtgggactgggcgtcaacgcgaataccgtggagaacacgatttacaccgcgctgttcgatatttccgtggacccacatgatgtggtgcaacacaccgcattcgagaacatcgatgtgattccggcgaacatcgatttgtccgccgccgaggtccaactggtcacagaagtgggccgggagcagatcctgaacagtgtgctgcgcaagctcaagtcggaatacgatctcatcatcgtcgactgccagccatcgctcggcctgctcaccgtgaacgcgcttgccgcagctgatggcgtgatcattcccgtggccgccgaattcttcgccttgcgtggcgtggccctacttatgcagtccatcgaaaaagtgcagtcccgcatcaatcccgcattggaagtggacggcgtgctcatcaccatgtacaccaagacactgcactgcgaagaggtctgccagcgcatttacgaggcgttcagcgaaaaggtgttccacacgttcatctcccgctccatcaaactgcccgattccacggttgccgccgcgcccgtggtggtctatgcacctgagcacaagacatcaaaggaataccgtgaggtggcacgtgagctcattgctcgcggcatcgtggcgtaatgattgtttcgataaacgatgaatgagacttccctttctcggctcccctccctgagggaagctggctcgcgtagcgaggctgaggggaactccgcggaagccgaaaccagcacggaggaatccgccacctccggcttccaagtcaacctcgaagtctattccggtccgttcgatgccttgctcggcatgatcgccaacaacaaactcgagctgaccgaagtttccctctcctcgatcaccgaggaattcctgacatacgtgcgcgggctcgatttcacgaaaaacatggatgaggccagcgcctttctcgacatcgcctctattttggtcgaggccaaaagcgtggcgattctgcccggcggcgaagacagccagcacgacgagcaaagccttgaagcgctgcgcgaacgcgatttgctgttcgcccgactcctccaataccgcgcctacaagcaggccgccggtgatttccgggcgcgtatcgccgccaatgccggccgattcccgcatccggcggccatggacgagggcattgccgccatgttgcctgagctggtatggacgctgaccccgctcgaactcgcccaactggccgcccaggtcatcgccaacgcgcccgcctccgaagtatcgatccaccagctgcacgtgccgctggtcgatctgcgggcccaatcgctggtggtgcgcgaccggctgattgcagcactggaatccaagggcgaccagtcgatgtcgttcagcgaattgacccgggactgcacttctcgtattgaggtggtggctcggttcatggccgtgctcgtgttcttcaaacaaggtgtgctgcagtatcagcaagatggtccgtttgccgaactgcacctgaggtgggtatccggcgtagacgaaacgatgaacgacgtgaacatttccgaaggcgattttgcgtaaggacggcgactggtgactgaacggattgacgcaacgaatgcaaccgagcacatggcggatgccgaatcgacggctggatccgcaaaggccgcggtgaggggagtggaggagacgcgccccgaatacgtggatttcacggtagacgattttcccggcgggctgcccgcatgtctggaagcgattctgatggtcgccgaccagccgcagaccgccaccgagctggcccgcattttggcattggaccgcaacacagtcgaagaggcattgcaagccctgcacgatgactatgagggcgatgaatcccgtggcgtccgcccgcgcggcttcgaactgcgccgcaccgctcgtggctggcagttcgccagtcgcgccgcgttcgagccggtcgtctcatcattcgtcaccgacggccagactgcgagactcagtcaggccgcactggaggcgcttgccatcgtggcctatcgccagcccgtcacccgagcccaagtggccgcgatccgcggtgtcaactccgatggcgtgattcgctcgctcacggtacgcggccttatcaaggaagacggcgtggaccccgaatcccgcgcggcccttttggtcacctccgagttcttcctcgaccaaatgggcctgaagagtctcgacgaactgccctccctagcgccgttcctcccgtccgtcgccgaaatgacacagtcgaaatcgggggatacggacgtgatttcgtagcgattggggcccgctacctggccaatattcgtgcgctagaccatccaatatgtgatttatggtcattgtgactataagtagtgctatgctctcaatgcagggagaacaaccggtatggaaagaggcatggcatgggattcggcaatgtgtccgagcgccgcagcgcaccgccacaggtcggcgtgtcagtggtgattctggcactcggcccgaaaggcgataccggcaacagtgccgccgattccggcaacgccgcgaactcggcccattcccgtctctggctgcccctggtcaagcgcgtccgtcagccgttcctgggctgctgggcgttgcccggcggcgacctgcgctccgatcggtcgttggaacagtccgcctacgcggccctcgaatcgaccacagacctgcacccgcgatacctcgaacagctgtacacctttggaggcccgacccggtcccatggcggattgcccatggtatccgtcgtgtactgggcgctcgtcggccagaccgaggccgcgggcttcgaggatggtgacaacgtacgatggttccccgaagacgaactgcccgagctggcgttcgaccatcgccagatcatcgactacgcgctgctccgcctgcgctccaaaatcgaatactccgacgtggccacccgactgctcggccccacgttcaccctgcgccaactgcacggcgtctatgaggcgattggcggcgaaaccctcgacttggcgaacttccgccgcaaaatgcttgcctcgggcgatcttgaagacaccggggagaaggtgcgcgaaggccgccaacgaccggccaccgtctaccgctacatccccaaacgacctgtcgagaatggcacgccccacgaatccgatggcgacgacatcgtggaactgtccagacaaggcgagcgtgaagacgctctcgacgcgctgattccatccgcgcgcatctgatttttcccgccgacccgcttcgggccggcatcacagacgtatatagggaaaggaaccactatgaccgcactatccactgcgccgtccgttgacgagatcatcgccaagctgggcgcgcaaagcacctgcgatgcaggactgacccaggacccatggcacttcgacaccaccacacccagctacggtcccggtgcctcgatgctcgaccgtctgcccgccaacgcgccgcgccagcaggtgctgccggacgaataccgcaaggcctccgacgaggagctgcagcagcgcatcaccgacgccaagcagcgtcttggctccaaactgttgattctgggccacttctaccagcgtgacgagatcatcaagcacgccgatttcgtgggcgactccttccagctggccaagaacgccaccgagcgcccggacgccgaccacatcgtgttctgcggcgtgcacttcatggccgaaaccgccgacatcctctccacgcccgaacagagcgtgaccctgcccaacctgtccgccggctgctcgatggccgatatggccaacatcgaccaggtccaggaatgctgggaccagctcggcgagatctgcggcacccagccggactccgatggcttgcagcagatcatcccggtcacctacatgaactcatccgccgcgctgaaggcgttctgcggacgcaacggcggcatcgtatgcacctcgtccaatgcgcacgccgtgctggaatgggcgttcgcccgcggcaagcgcgtgctgttcttcccggaccagcatctgggccgcaataccgcccgcgcgatgggcattccgctgagcgagatgccgctgtgggatccgttcaaggcacagggcggcgccgccgatccggccgactacgcccgcgccaagatgattctgtggaagggcttctgctccgtgcaccagcgcttcaccgtcgaacaggtcgaacgcgcccgcaaggcatacccgggcgtcaaggtgatcgtgcaccccgagtgctcgatgcaggtggtcgacgccgccgacggcactggctccaccgcgtacatcgtcaaggagatcgccaacgcacccgccggatccgccatcgccgtgggcaccgaaatcaacctggtgaaccgtctggccgcgcagtacccggacaagaccgtgttctgcctggacccggtggtctgcccgtgctccacgatgtaccgcatccacccggcttacctggcttgggctttggagaacctcgaagccggcaacgtggtcaatcgcatcaccgtggacgaagacaccgcccgcgaagccaaggtggcactggagcgcatgctgcgcgttcacccgtgacatgcttctagctcccctccctgaggggagctgtcaccgtaggtgactgagggggcagatgacgcaaaaacagaggaaagcaacacaatgagcaacactgaaatcgtcgtcgtgggcgcaggcgtcgccggactgtccgcggcactggccgtggccggcaccggacacgacgtgaccttggtaaccaaggccggactggtggaatcgaacacctatcatgcgcagggcggcatcgccgcggccatcttctccgacgacgacccgaagctgcacgccgccgacaccatggccgcgggccatggcctgtgcgacccgaaggccgtggacatcctcacccgtgagggtgcggagcgcgtccgcgagttcgccgcggccggcgtccacttcgaccgcgacgcgcagggacacatgctgcgcggcctggaagcggctcattcgcgcgcccgcgtggtgcatgccgggggagacgccaccggcaaagtgctcgaactggacgtctccgccatggtgcgcaagaacccgcgcatccacatcatcgagaacgccttcctcaaagacctcatcgtgcgggacggccacatcgccggcgtccgcctgctgatcgacgggcaggacaaggatctggccgccggccgggtgatcttggccaccggtggcgcaggccgtatgtacccgtacaccaccaatccgccggtctccactgcggacggtctcgccgccgcatggcgtgcgggcgcccaggtcgccgatctggagttctaccagttccatcccaccgccatggccgtgggcgagcacttcctcgtctccgaagccgtgcgcggcgaaggcgcggtgctgctggacgaacacggccaccggtatatgaaggacatcgatccgcgcgccgaactcgcaccgcgcgacgtcgtggcccgcgagaacttccgcgtgatgcagacgcaaggtggcaagcccgtgatgctcgacgtctcgccgatgacccgcgagaaccccgacctggccagcttcctggcccaccgattcccgaccatcgatgcctatacgcgttcgcttggcttcgactggagcaaggagctgatcccggtggcgcccgccgcgcactactacatgggaggcattcgcaccgatctggacgcccggacctccatccccggcctgtacgcggccggcgaatgcgctcgtaccggtgtcatgggctccaaccgccttgcctccaactcgctgctcgaaggacttgtctacggacgccgcgccggtcttgccgccgtcgcggacggtgacgacgcggtctgggcacccgaaccgttcctgaactccgccaccggtgccgtgttcgaccatgcgccgatcgcgctggccgctcctgccactacggctgctgctgacgataccgccgccgacaaggtctgggaccgtacccgcatccagaacaccatgtggcatggcgtcggcgtactgcgcgacgaggccggactgaaaaccgccatcgccgaactcggccaaggcctcgccgccgcaaacgcccaggctgatataaacgccgatggcgctgcaagcagcgttgaggctttggagaaccgcaacatgctcaccgtaggctatgtggccgccaccgccgcgctcgcccgcaccgagtcgagaggcgcccacgcccgcaccgactacagcgagccagtcgacaactgggcccactccgtcgcctacatcaaggactgacccatgctcacatcacacatcatccgcgtcgccgtcgaagcggcgctcgccgaagacgcgccctacggcgacatcacctgcgagaccaccatccccgcggacgaaaccggctcggcccacctcaccgcgcgcgaaaacggtgtgatgagcggcatcgacgtgttcgccgcagccttcgccgcacagaacccggccgtcaccgtcaccgccgccatcaaggacggtgagcgattccagcgcggccagatactcgccaccgtggaaggcccggtacgcgacctgctcaccgccgagcgcatcgccctcaacttcacccagcgcatgagcggcatcgccaccatgaccgccgccttcgtggacgcggtgaacgccatctacggcgacgactatgacggacccgtcacccggccacgccgctacgagcgcacccgcatcgtcgatacgcgcaaaaccacgcccggcctgcgcccgttcgagaaatacggcgtggtctgtggcggtggccacaaccatcgctacggactgtccgacgcggtcatgatgaaggacaaccatctggcggcgctcgccgcgcgcggcatcgacctggccggcgcgatccgccacgtgcgcgaacaggtgggccacaccacgcatatcgaagtggaagtcgaccgccttgaccagattcccgccgtgatcgccggcggagcggacaccatcatgctggacaatttctcgctcgacgacacccgtcgcggcgtggagctcatcgacggcaaggccatcgtggaagccagcggcaacatgagcctggagcgagtgccagccgtggccgccaccggcgtggacgtgatctccgtgggcgcgctcacccactccgtgcgtagcatcgacctcggattggattggaactagtcatggccgatacccccaacacgtccagcgaagccggcgaactgtacctggacgccgccgccaccgaaccagtgagcccggcagtcatcgaggccatgaccccgttcctgactgaggcctacgccaatccggccagtgtgcaccagcctggcaaaaccgcggcccgcgcgctggacgcggcacgcgcatcattcgctgcggcattgggcgcccggccggatgacgtgatcttcacctcaggcggcaccgaatcggacaatctggccatcaaaggcattgccatggcccgcatgcgcaagctgggtctgcggccggtctacggactcgacgaaaccgatgacaaacagctggcaagcagccgcccgcgcattatcatttccgctatcgagcacccggccgtggcccaatcggcggcatggctgcacgaatggttcggcttcgaagtcgtgcgcattcccgtggatgcgcaagcacatctcgatctcgacgcacttgaacgcgagctcgacggcgaggccggcgaacgtaccacgatggtctccaccatgctggccaacaacgaggtcggcaccgtggaacccgtggaggaactggtccgcatcgcccatgcgcacggcgtgcccatccatgtggacgccgtacaggccgccgggcagattcccattcgcatgcgcgactgggatgtggacgccctgtccgtgtccgggcacaagttcggcacgcccaagggattgggcgcactgctggtccgcggccgcacgcccatcgaaccggtgctgtccggcggcgggcaggaacgcggcctgcgctccggcacacagaacgtggccggtgcggtggcgcttgccatcggactgaacgaatcgaacgcgcgcatgcaggcgcagtaccgtgaattggtcgcgtcccgagacatgctcatcgatgcggttcgccgggtcgtgccccgcgccgacctgaccggcgaccccgtgcgccgtctgcccggtcacgcctccttcgtctttcccggcgtcaccggcgaggcgctgctggtcgatctggacgcgcgcggcatcgcagcctcatccggctcggcctgcgccatcgggcgccacgagattcctgccacgttgctggcgatgggcctcgaaccgtccgtcgccaaatcggcattgcgcatgacgttccgcaggccattggcccgcgagcagatcgaacgggtcagcctggccctcgaagagtcctatgccggcctgacccgacactaaatctgacgccacttaccagaaaggaaacgacgtgagcaccaccactccagcgcaacccgcgcagctcacccgcaacgagcgcctcgaccggctgcccttcaacaaggcgcaccgtaaactcctcgtcgcctccggcatcggctgggcattcgacgccatggacgtcggcctcgtttccttcgtggtcgccgccatcgcagccgacccgcacttcaacctcaccccgaccgaaaagtcgtgggtgctgtccatcggcttcgtcggcatggccatcggcgcggcggtgggcggcttcatcgccgaccgcgtgggccgcaaaaccgtgttcaccgccacgctgatcatcttcggcatcgccaacggcgccatggcgctgtcctggtcgctcggcatgctgctcggcgcccgactgatcatcggactgggcttgggcgcggaactaccggtcgcctccacgctggtctccgagttttcgccgaccaaacagcgcggccgcatgactgtgctgctggaatcgttctgggccgtcggctggatcgtcgccgccatgatcggctacttcgtgatcccgaacaccggcgactggggctggcgctgggcgctggccatcggcgcgctgccactgctctacgcaatcgtcacccgcgtgcacatcccagaatccgtgcgattcctcgaagccaagggtcgcgaagacgaagccgaaaaggccgtgcgctacttcgaggaagccgggggagtagccccggtaacctctcccaagggcaagccgctgccgaagatcaagacgcgcgaactgttcggctccaagtacctggcccgcaccatcgccatctgggccacgtggttcttcgtgaacttctcctactacggcgcgttcacatggatgccgtcgctgctcgccgaccagttcggctccctgaccaagtcattcggctacacgctcgccatctccatcgcccagctgcccggttacttcctagccgcctggctggtggaggtctggggccgccgcaagacgctgagcatcttcctggccgtctccgccgtggccgccttcgcgttctcgcaggccggatctgtggccctcgtgctcgtgttcggcatgctgctgtccgcctccaacctcggtgcgtggggcgtgctgtacgccgtgaccccggaaatctacccgacccgcctgcgtggcgcggccgccggtgccgccgcagcggtgggccgcatcgccgccatcatcgcgccgctcctcatgccgtggttcctgaccctgtccggcggcaacaaggccgtggccttcatcatcttcgccgccgccttcatcatcgcctgcgtcgccgccctctgcctgcccgaacgcaaaggcctcgatctcgaagactgacggaagtcgatgacgggagaacagatatttgcctgattaccggcagaacccccgcgtcccggcgaaagggacgcgggggttctgccgtttgaaggccgtaaaaacggcagaaatcccgcgaggggttcgtcgagacgcgggagttctgccgttgtgaggtgcttttctatgttccgacatagtcaaggtgtgcgagtaccatcgtgacggtttgtgtgtaggtatgaataaacacctcagagtaagtacttaagtactcgagaacgcaagtaccgaacgattacgcaaaagaatcagtattaagagaggtttcgatggcggttcgtggagatatccgtaatgtggcgattgtggctcacgtcgatcacggcaagaccaccctggtcaatgccatgcttcagcagtcgcacgtgttttccgagcgtgaggaagtgccggatcgtgtaatggattccaacgatctggaacgcgagaagggcatcaccatcctcgccaagaacacggccgtggaatacaccggtccgctggccgccaagtacggccacccggagggcatcaccctcaacatcatcgacacccccggccacgccgatttcggcggcgaggtcgagcgcggcatctccatggttgacggcgtcgtgctgctcgtggacgcctccgaaggcccgctgccgcagacccgcttcgtgctgcgcaaggccctcgaagccaagctgccggtcatcctgtgcgtgaacaaggtcgaccgccccgacgcccgtatcgaagaggtcgtcggcgaaacctccgacctgctgctcggcctggccgacgacgtgcagcacgagggcatcgacctggaccttgaccagctgcttgaaatgccggtcatctactgcgccgccaaggccggctacgcctccgtgaaccagcccgccgacggtggcctgccggacaacgacaacctcgagccgctgttcgaaaccatcatctccaccatcccggcccccgaatacgaggagggcgccccgctgcaggctcacgtggccaacatcgactcctccgacttcctcggccgactcggtctggtccgtatctacaacggcacccttgagaagggcaagacctacggcctgtcccgtgtggacggctccctcgagaacttccgcgtctccgaactgctgcgcacccagggcctcgagcgtatcccggtcgaatccgcaggccccggcgacatcgtggccgttgccggcgttaacgacatcatgatcggcgagaccatcgtcgaccccaacgacccgaagccgctgccgctcatccatgtggacgatccggccatctccatgaccttcggcaccaacgactccccgctggccggcaccgagggcaaggaccacaagctcaccgcccgcatgatcaaggaccgtctggaccgcgagctcatcggtaacgtgtccatcaaggtgctgcccaccgaccgtcccgacgcttgggaagtccagggccgtggcgagctggcgctggccgtgcttgccgagcagatgcgccgcgaaggctacgagctgaccgtcggccgtccgcaggtggtcaccaagaagatcgacggcgtgatcaacgagccgatggaaaacaccaccatcgacgtgccggaagagtacatgggtaccgtcacccagctcatggccgaccgtaagggccgtatggatggcatgaccaaccacggctccggctgggtccgtctgcagttcaccgtgccgtcccgtggtctgatcggcttccgcaccgcgctgctttccgccactcgtggcaccggcatctcctcctccatctctgccggctacgcgccgtgggctggcgccatcaccattcgccagaacggttccatggtttccgatcgcaagggtatcgccaccccgtacgccatgcagcgtctgcaggcccgtggcaacttcttcgtcgaaccgcagtccccggtgtatgaaggccaggtcgtgggtgtgaacaacaagcccgacgagctggacgtgaacatcacgctggccaagcacatgaccaacatgcgttcctccaccgctgacgtgctcgaaaccctgaccccgccgatcaagatgagccttgaggagtccctggacttcgccaacgaggacgagtgcgtggaagtcaccccggagtccatccgcgtgcgcaagatcatcctcggccgtgaggactggtacaagtggcgcgccaagcagcgccgccagaacgccgcccagcagggtaagtgatttggtgcggctgtagccgaccattctctctagctcccctctctgaggggagctaagtttattcctcaccaagtcatatccccacctatactgaaacgcatgactgtgaagagcactactgaattgcgtccgtggtcgtatcgccagaacgcgctggtcaaatcgttgatcacgattgcggcgggcgtggcttccgcctttgtgggcacgttcgcccaccgtatgggtgcggaactgaatattccgtatggtctggtgctggcgtttctgctgatcggcctatcgacatggtgcgcccgttcgcgcatgggcgcggtcggactggccctgcacctcatcgcctcctcactgaccgcatggggcatggcgctgaccaccacatccggcaaagcgctcatcgtcgccggattccaaggcgacatgccgttcttctcccaacatgccggctacatctggctgtacggcctgatactggtccaagtcgtcctgctcattcttcccgcccgctggttcgtcattcccactcattctgaatcgcgcgcgtaactatatatggcgatacattcccgggaatgcgtcgcgtatcggcgggcgtaggggattacggccgctaccatagaacattatggcacgcatgaaactgttttacttgggcccggagggcaccttcacccatcaggcggcaatgacggccgccgaccagttcgccacactcggcgacttcgacctcatcgctctgcccgacgtgcccgcgatcatgcaggccgtacagtcgcgccaaggctggggcgtcatcgcatgggaaaacaacgtcgaaggctatgtggtcccgaatctcgacgcgctgatcgacgcccccaacgcggccggcttcgcccggatcagtgtggacgtggccttcaacgccttcaccgtgcgcggccacagcatctacgactgcaccggcaaccccgtcagcgcccacccgcacggtctggcccaatgcacccggttcatcgccgaacaccatttgcagcccgaacccgcatcctccaacgccgccgcctgccgcgacctgaagcccggccgcgtggcgctcggccccagcatctgcggcgaactctacgatctcgacaccctcgccgaacatgtgcaggatttcgatggcgcgcacaccgaattccttgtcatcgccccgcgtgatgtggtccaggaactcaacgcccgcgcccacagcaatgacgccggcgacttcgaaaccatcatcaccttcatcccgctggtcaccggccccggcgtactcgccgacctgctggacgtcctgcgcgatgcgggactgaacatgaccagcttcatctcgcgcccgatcaaaggccacgacggaacctacagcttcatcgccacccttgacgccgccccctgggagccgagattccgcaccgcactggaagagatcgccggacacggcgactgggcaaaaaccctggccgtctacccacgccgcgaacgcccgaacccgccggtcgacgcctggatgctgcccgagggcggcgtccacatcaccaatcgcgcgccggaaggctggcagtacaccgaggaagcaaggaaggaactgctgtggtagatacagtcggaatcgtcggactcggattgatcggcggctcgctcgcacgccgcctgaccgagcgcggcgtgcgcgtcgtcgcgtggaaccatcgcccgcacccctacgcccaggccgaagccgatggcattttctgcaagagcacgctctccgaactcatggatgccgagccggatgtggtcgtgctgtgcaatccgctcaaggcgatgcccgcaatcctcgccgccctggccccgctcatgggcgaccatccgaacaccacgctcaccgacgtgggctcggtcaagggcatggtccgcgatcaggtcaaggctgccgggctggggaagtgctacgtcggcgcccatccgatggccggcaacgaactgtccggctggcaggccgccgacccgcatctgtacgacggtgccctatgggccatcaccgtggacgagtccacggactaccgccgcttcctcgacgtcgccgcgatgatcaccaaggacgtcggcaaccgcgtcatcgtcgtggacgacgaaacgcatgacaaggccgcggcgatgatctcccacatgccgcatgtggtgtccaccgcgctgatcaacgaactggtcgccaacccggaccgcaacatcgccgccgcgctggccgccggctgctggagggacatgacccgcgtgtccctgaccgacccggaccgcacgcgcgcgatggtcgaggaagactcgctgaacgtcgaagcgctgctgcgccgcatggcggcacgtctgaccgatatggccgaccaactgcacgctggtgccgccggcgagcaggatgtgatgggattcttcgccgaaggcgaccccttccgccggtacaaggccgccgtgacacatgccggcatcaccgctgcacaagacggtacggccaccgctgcgccgcaagccggcacaactgccgccggattcccggaacgcgagctcgccgtccccgaagccggctggcagcagaccctgctgttctccgcacgccgaggagaagccatcaccggcttcgtccatccacgtcaggccatcatccaactgcgccccgccatgtaactgcgtaccgccatgtaggcccgtgcgcaggttcccctcgccgcctgtcacgaagaaggccgcgcgagggggatgaagttcccgcttgttttcgtgagaagaccgtgtggctccgctgttcgaaaggctcaaaggagtaaggtagtctgtaccgtttttcgggaaacgcatcgaagttgatgcggcgaatggttaagggggatgatgacgtatgacgttaccaaggcagattccggccggtgcccgcgtggtggtgcgcatcaccgacggcattgacccggtcgaccaccgtatgaagttccgcgactatgtgggtcacgtggtttcctgggacggatacacgttggagatggtgcgtgacgccgccgccaatggttcgcgcccggcccagaacgtgaccatccatcaggaacagattgccacattgaaacccgtgccggagcggcgcaacacgccaccccggccgtaacccaaggccataaagaattcggaggagaacgagagtgtcatctacgcagttcgacggcgatatcgactccttcgtctcctatctgaagtccaaccgcggcctgtcagcgaatacgctcaaagcgtatcgcgcggatctcacggcatgtctgcacctgttcgagctgcgcggcgtgaccgatctgaacgagatcacgctggatgatctgcgtagctggatggcggtggaatcgcgcgatcacgcccgcagcagcatggcccgcaaaaccgtggccgtgcgcgggttcttcgcgtgggcctatgagcatggggtgaccaacaccgacccggccgccacactgatgactccctcgattcccagcacgctgcccgcggtgctcaccgaatctcaagctgagcagttattggatgtcgccgaacaggccgttgcaacaaaccagtacaagggcgatgggggagcggcagccgcgtccggcagtggcagcggcaaggcagtcggcaagacagctgataagtcagccgacaccgtaaaccgcaacgaggcacccgcccgtgcagacaagcgcgacagcgcccgagtcgtcgccgaatcgcagcgcaacgccgcgattctcgaactactgtatgccaccggcatccgtgtcgccgaactggtgtcgatggatatcgttgacgtcgacttctccaatcgcaccatcaaagtcaccggcaaaggcaacaagcaacgcgtggtgccgttcggactgcccgcccagcgtgcgctggagacttggcttgaacaagggcggcctgtactggcccgtacggcaacggatgcagccaagtcccgtgctaccaacgccctgttcctcggcgcacgaggcggccgtatcgaccaacgcatagcccgtgacatcgtgcacagagcggcccgagaggccggagtgccggatatcagtccccacgccttgcggcattccgcggccacgcacatgctggatggcggcgccgatttgagggaggtgcaggagatgctcgggcattcctccttgaaaactacacaacgctatacgcacgtctccatcgagcagctcaagaaccgttacggacaggcctttccgcgggcatgaccactatgtggacattggttaacaaactcagcaaagactgaacctagccggcaagaacccctgaattttacatgggtgtaacaaaaaatacactgcttgtctcccaagtgcgcaaaaatgacaggtaacagcaacggggttgggtgtccgaagcggcgggaagcgtaagtgtcccgacgatgaggaaatccgaccccgttcgcatgaggcgaggctgaaacgcttcgcaacctaatgaataggagaaatcatatgaagaagaaagctcttgctttcgctgccatggcttgctccgtggccatgctgctgagcgcctgcggcggctccaacagtaacgctgcctccggtgacaccgctggctccaacatcatcactgcgtacaactccgaaccgcagaacccgctgatcccgggcaacaccaacgaaaccggcggcggcaagccggtcgacctgctgttctcccgtctggtctccttcgacaaggacggcaaggcttccaacgaagtggccgagtccatcaccccgaacgatgacgccacccagtacaccatcaagatcaagtccggctggaagttcaccgacggcactccggtgactgctgagtccttcaccaaggcttggtcctacgtggccaacgccaagaacgcccagaagtgctcctccttcttctccgccatcgccggctatgacgatctgcagaaggatggcctcaagggtgacgagcagctctccggcctcaaggtcgtggacgacaccaccttcaccgtcgacctgaaccagtccgactccgtgttcccgattaaggtcggctactcggccttcgccccgctgcctgagtccttctacaaggacccgaaggccttcggcgaggctcctgtgggcaacggcccgtacaagttctccaagtgggaccacaacaaggaaatcgccctcgtcaagaaccctgactacaagggcaacgaggacgtcaagaacgatggcgtgaccttcaaggtctacaccgacgactccgccgcctaccgcgacattcaggccggcaacctcgacgtgatggagtccgtcccggccgccttcaccaagaccttcaagaccgacaagaaggtccaggcttactccgaggccggctccgtcatccagaccttcaccatcccgtcctcccttgaccacttcaagaacgacgaggaaggccagctgcgtcgccaggccatctccatggccctcaaccgcaagcagctcatcgacaaggtgctcaacggcaacgccaccgccgccaccgagttcacctccccgaagaccccgggctactccgactccctcaagggtgccgacaacctgaagttcaacgcctccaaggccaaggaactgtgggccaaggctgacgccatctccaagtacgacggccagctcaccttctcctacaacgccgatggtggtgccaagccgctttacgacgccgtcgtgaaccagctcaagaacaacttgggcatcgacgcggccaccaacccgatcccgaccttccaggaattccgtgacgcggtcaccaaccgtcagatgaagggcgccttccgtaccggctggcagcctgactacccgtccgccgagaactacctgtggcagctgtactccaccgctgctgctgatggcaacggctccaacgatggtgactacaagagcccggccttcgatgacctgtgcaagcaggctgctgccgcttccagcactgatgacgccaacaagctgtaccagcaggctgaggaaatcctcctcaacgaccttccggccatcccgctgtactactccaacgcctccggtgtggcttccctcaacgtgaagtccggctacgccttcgattggcagaacctcccgacctacaccgagatgtccaagaagtgagtctgactcactgaacggataccgctaggtagttcggaaataaagggcgaggatcgcaagatccccgccctttttgttgtgtgcggggtgcttgctcacgccatcgggaaccaagttaaagtatccactatccgaccgcaaccatggacatatccaccagcattgcccaatctcaaaccttgcgttaacgcaaatttacatatcacagtccgggcatgcggtaaactgtcggagtatttatcgaccggcgggggcgtactataccctttctggccggtctaggaaataaggagcaaccgtatgggtaagtatcttctgcgacgcattctgcagatgattcccgtggttctcggtacgactcttctggtatatgcccttgtattcgccctgccgggcgaccccgtcaaggccatgttcggagacaagcctgtcaatgaggccgtcgcagcccagatccgcgcagaataccatctcgaccagccgttcatcgttcagtacttcatctacctgaagaatgcactgaccctgaacttcggcgataccttcgccggccagcccgttctcgacgaaatcacccgcgccttcccggtcaccatcaggctcggcttgatggcgttcgtgttcgaggcgattttcggtgtggtcttcggcattatctcgggcctcaagaagggcaagtggtacgacaccgttatcctgatcgtctctctgctgcttatttccgtgccgaccttcgtcaccggcttcgtcatgcaatatgtctttggtattcagtgggcgatattgccggtgacggcaggcgccgaccccggcttccttgatctgctcatgccggccatggtgctcggttcggtgtcgatggcctatatcatccgactgacccgctccgaaatctcctccaacatcgccgaggattacgtgcgcaccgcacgcgccaagggcatgtcgaacggtcaggtcatgctgcgccacgtgctgcgtaactccctgattccagtcgtcacctacctcggccaggacatcggtgccctgatgggtggtgccatgatcaccgagcagatcttcaacatccacggcatcggcttcctcacctaccagtccattctgaagggcgaggcaaacctggtggtgtccatcgtcacgttgctcatgctgattttcgtagtgtgcaacctcgttgtcgacatgctgtacgcggccctcgatccgcgtatccgttacgcgtgatagggaggagtgagtcacatggcaaacgaaaccactgaaaacgagctcaaccagaccggcgagccaggaaccgaatacttcatggaaaccctgcccggtcaggaccgttacgtagctcctctcgacgagaccccgttgcaggacgtcgattccgtcgacgaatccgcaccggccaccagcatgtgggccgacgcatggcgaaccctgcgccgcaacccgttgttcatcatctccggcttgctgatcctgttcatcatcgtggtggccatcgcccccggtctgttcaccaagcaggatccgaacgcctgcgatctgggcaactccttgagccccgcctccgccggacaccccttcggctacgacctgcagggctgcgacgtgtacacccgcgtggtctacggcacccgtacctcactgtccgtcggcgtgctctccacgctgctggtcgtgattgtcggtaccctgatcggtgccgtcgccggcttcttcggcggttgggtcgacgcggtgctgagccgtatcaccgacatcttcttcgccctgcctatgctgcttggcgccatcgtggtgcttcagatgttcaagacctccaagtccatctggaagatcgtgctggtgctgacgctcttcggctgggtcggcgtatgccgtatcgcccgaagcgccgtgctggaatcgaagaacctcgaattcaacaccgcttccacggccctcggctccacgcctgccagaaacctgttccgtcacatcttgccgaactccctggccccgatcatcgtcatcgccaccacttcgctggcctcctacatcgtggccgaagcaaccctaagcttccttggcgtcggcctgccgaccaccacggtgagctggggtggcgatatctccagcgcacagaccaacctgcagactgatccgctggtgctgttctacccgtccgccgcactggccatcaccgtgcttgcgttcatcatgatgggcgacgccgtcaaggacgccctcgatccgaagagccgtacggcctgagcgaggggagtggagaaacattatgactgacaacaccaacgccaagatgctggctatgcagaaagagcatggtccgctgctcgaggtcaaggatctggccatcgacttcaccactgacaccggcaagccggtgcacgcggtgcgcgatgccaacttcaccgtctaccctggccagtgggtggccatcgtgggcgagtccggttccggcaagtccacctccgccatggccgtgctgggtctgctgcccggcaccggtcacgtggtcaacggctccatcaagctcgacggcgaggaaatcgccggcgccaagcagagcgagttcgacaagctgcgcggcaccaagatgggtctcgtgcctcaggacccgatgagcaacctcaacccggtgtggcgtatcggcacccaggtcaaggaagcactgaaggccaacaacatggacgtggctcacgaaaagcgctccgcccttgccaaggctctggccggcgacgaggtcgaagtcaagggcaacgacgacgagaccttcctcggagccaaggaactgcccgagctcatgaccgaggccaagaaggctttgactgaagccggcgtgtccggcgaggccttcgacaaggccgtcgcccgcttcaccaacgaatgggttccgggctccgaaacccgttggcgcgtggccgacgacctcatcaaggccggcgtggccgacgaccaggcctggtatctggctaagaagtacgtcaccggctccacaatggatgaccgtatcgcgggtctgctgtccgaggccggtctgcccgacgccgctacccgtgcccgtcagttcccgcacgagttctccggtggtatgcgccagcgcgcgctcatcgccatcggcttggcctgccgccccgatctgctgatcgccgacgagccgacctccgccctcgacgtgaccgtgcagaagcgcatcctcgaccacctgcacatgctcaccgactcgttgggcaccgccgtgctgttcatcacccacgatctgggccttgccgctgagcgcgcccagcacattgtcgtgatgtacaagggtcaggtcgtcgaatccggcccatcccttgaagtgctccagcacccgcagcacccgtacaccaagcgactggtggccgctgccccgtcgctggcctcccagcgcatcatctccgccaaggagcgtggtgaggatgcggacgctctgctcgatcaccacatcgccggcgaaagcacgctcgaaaagagcgagcacatcatcaccgtcgaccacctgaccaaggaattcaagctgccccgcaagaaggagatgttcaaggccgtcgatgacgtgtccttctccgtcaagcgtggcaccacactggccattgtgggcgaatccggttccggcaagtccaccgtggcgaacatggtgcttcacctcctgaagcccacctccggcaaagtgttctatgaaggtcgcgacacctccacgttcaagtccaaggaccttctgggcttccgccgccacgtgcagccggtgttccagaacccctacggttcgctcgacccgatgtactccatcttccgttccattgaggagccgctgcgcatccacaagatcggcgacaagaagtggcgtgccaaccgtgtcaaggaactgctggacatggtcgagatgccggcttccgtgatgggccgttacccgaacgagctctctggtggccagcgccagcgcatcgccatcgcacgagccatggctctggacccggacgtcatcgtgtgcgatgaggccgtgtccgctttggacgtgctggtgcaggaccaggtgttgcgcctgctcaacgatctgcaggccgaaaagggcctgagctacctgttcatcacccacgatctggccgtggttcgtcagatcgccgacgaggttgtggtgatgcagcacggcaagctcgtggagcacgccaccaccgacgaggtcttcgaccacccgcagaagcagtacacccgagacctgctcgacgccatccccggcggcaagctccaactcggtctggactgataggacattctaaattagctccctcttatgagggagctaattttttatacctcaatgtaatcgtgagtgcggtactggtagagaggccaaaatagtatggctgcatgaccatcaccatcaccacatcgaacgtcaacggcattcgcgcggcaaagcgcaagggcatcgaggactgggccggcaaacatgctccggatgtctggtgtatgcaggaagtgcgcgccccgcaagaggatgtcgattcgattttcggcgaattcggtttcgagtatgccaccgccggcaagatcgcctcaccctctgacctgcattcgctgaacgaggtctgccgtgtcaagggtcgtgccggagtcgggctcctcaccgatcttgaggtgaccgataaacgctatggacttccgggcttgagcgaggatgtggattccggccgttggattgagaccgatgtcaagacgccgcagggatacacgatcaccgtggcctgcgtgtacgtgcacgccggcaacaccgatgattcgaccaagatggaacagaagtaccgttttctggacacgatgctcactcgcatgggcgagttgcgcgacgaggccgcgcacggcggcaagcaggcggtattgtgcggcgatttcaacatcgcgcacacgccgctcgacatcaagaacgccaaggccaacgaaaagcacgccggcttcctgcccgaggagcgcgcctacgtggacaagtggctggatgaatatgagtttgtggatgtgatgcgttcgctcgccggtgatattcagggtccgtacacgtggtggagccagcgcgggcgcgctttcgacaacaatgtcggctggcgcatcgactaccagttcgccacgcccgagctggcggagaccgcgcgcggctttgtgatcgacaaggcccccacatacgagttgcgttggtccgaccacgcgccacttaccatcacatacgacgtgtgactcagctttctctaagcctgagtgctagtgttagcaaggttgcaaccgttacatgaaacgaggaattatgggactgttcggattcggcaagaagaagagcaagaaggaagccgagccggccgttgagcctgtcgatgaggacaaggtggctgccgcagaagcgaacgctgccgcaaaggccgagagcgcggagaccgtgctcgccgaaccggccagcgaataccagggccgcggagaagagcgaggcccgtgggacgtcaatgatgaggacgtgcccgattatgacgattatctggatctgggcgcctactacctgcccttcctccggggcatccaactgcgtatcaaggccaaccgcgccacccagcaagtgcttggttccaccatcaccttcggctcctccagcctggagatcgaagcctttgccgcacccaagaccctgggactgtgggatgacgttcgcggtgacctgcttgaagccaacaaggccgcttctgaagtggacggtgtgttcggcaccgaactgaagctgccggtcaatgtcaagggcggcaagaccgtgaacacgcgcatcgttggtgtggacggcccgcgctggatgctgcgtggcatcttctccggcaaggctgctatcgatccggacagcccggagaccgaggcgctgaacaagttcttcgccggcatcgtcgtcgagcgtggcgaggagcctttggcgccgcgcgatctgatcccgatgcatccgccggtcgcccccgctgagcgtaaggccgccaaggccgcggccgaagccggcgaggcgaacggcaaggaacacttcaaggacattccggacaacaagccgaagggcccgttgagccaggaccagcagaccgaagtgaagaccacgctgtctcgcggcccgatgttctccgaagttcgctgatttataggaagagacttggcagacaacaaacgcaccggcctgtccgctctagccgacgccggcaatgaaggcgaggatttctccgtcatcgacgccatcggtggtccgcgtggcgtcatcgaatccatgctgcctggcgtggtgttcgtcgtactgttcgtggccacgagcaatctgaatctcaccattgcggtttcggccgtgttggcggtattgcaggttattgtgcgactgattcagcgccagtcggtaatgggcgcggtctctggtctggtggcggtaggcatctgcctgatttgggcatggcagactcatgaggcccgcaattactacatcttcggattcattaccaatgctggctatgccgcgttgcttgccgtgtcgctgattgcgcgcgtgcccggactgggtttggtcgtcgaattcatccgtagcctgcccaccgagcatttcaaggcatggttccatgactggatggacgacaaggccctgaaacgcgcctatatgattgtcaccggcctgtgggtcggtctgttcctgctgcggctggtggtgcaggtgccgctgtatctgaccaaccatgtggctgcactcggcgtgacccgcctgctcatgggcattccgttctgggcattggcgatttgggtgagttacctcattattgccacgccgatgcaccggcataaggtcgcggctaggaagatacagactgaagtcgctgttgatgccgaactcgaaccgagcgcaaccggaaaggacgatgatgcaagctgaagttcgtatcgaacgatacgccgaccaaggccgctgcgtggcccatatcgacggtcgtgtggtgttcgtccgcttcgccttgcccgacgaactcgtgcgagtcgagcttgacgagccccacgaccgggacgaccggttctggaccggcgaagtcgtcgaggttctcgagccgtccgaagaccgagtcaccccggcatggccacttgccggtcccttggcgatgggcgggggagtgggcggcgcggatctcgtgcacgtctctttgcccggccagctcaagtggaaggccatcaccgtctccgaacagatgagccgactcggccatatcgacgtggccgttcccatcgagcgcatgcccggcgacaaggcagccggcggcctcaattggcgtacccgcatcgaaatgattgccgacgacaacggcatgccatccatgcgccggcgcggcacacacaaccgcgtggccatcgacaccatgccgcttgccacgcgcacgctgctggacgtcgccaagcgcgaacacgtgtgggagggcggctttgaacccggctcccagattcgtctttccgtgcccgaaccgcgcggcgagatcgtcgataccgcggcagcagacgacaattacgccgtacttgtggacggcgaactgcgcgccggctcccagctgctcaccgaacaggtgaccatcaacggcacgaccttcgactatcaggttgacgccaacggtttctggcaagtgcatcgccaagcgccgatcgccctcggtacgcacgtgatcaacctggtcaacgggcagctgcagtcagcggcggacgccgtaatctgggatttgtattccggttccggcctgttcaccctgccgctggccacaatgaccggtgaacgcacccgcatgctcagcgttgaaggcgcgcgtgtggccgtcaagaacgcccagcgcaatctgcgcgccatgaatctgaacgacgtggacgcccgcgcgggtgacgtctcgcgcacgctggaccatgtgccggcgcatctggccaagccgaatgtcgtagtgcttgatccgccgcgtgccggtgctcgtgccaaggtctgccgccagattgccgcggccggcgcatccagcgtggtctacatcgcctgtgatcccaccagcctcgcacgcgacaccgcgacactcatcggcgaaggctacgagctcaaagacatccgtgccttcgatatctacccgatgacccaccatgttgagacggtggccctgtttacccgctgacaggtgagcatatgacacgacgaattctcggattgctggcctgcatggcggctgtgttgtccctagccgcctgcacgccggccggtagggcggtcggcgatacccaagacagcatgccggaagtcgcccacgattccacacatcccacggatgtcacagtcggctttgtggggtcgactgacaccgccgcagacgagttcgtcatcaatgcgctgtctgatgacaaactcaatgtctactatgcctcgctcgaaacatccgcaagctcggcaaacgcaactgatggtgtatccggtgaaaccgaatcttctgacgccggcactaccagcgaaaacggtgccgatagtatggatgctcatactggcgtcgacaagaatgcggccaccgcacagcagggtgttgccgatttcgtagctcgcgcggtcaaaatcgtggttatcagcggcatcgacgttaccgacgccaaccgggagagctggaaccagacgttgaccaatgcgcgtgaagccggtattccagtcgctctcattgatccaaagcatgcgcccgaagatgaactgctgtacgccgtcatccttcacctcaacaccaacagtgccgattctggcgacactgccgataccaagccaatgactattactgacgccgtgctcaccatcacgcgcgacgaaccccacgaacgtgagatcaaagtcaccgtctcctgagccgaatcagccccttgaagctgagaaagcaccctgaatcatccctgagccttagcggattgcgaaacaagacgcggtaggctggggaatatgagtgcaacaacagccgtggaaatgcctgagatcggagcgaccggtcttacccccaaagaagtggtgcagcgtatcgaaagtggccaatcgaatgcggtgaaaacctccagctcgcgttcggttcaagatatcgtgcgagccaacgtgttcacgctgttcaacggcatcatcttcgccgcgatggtactggtgctgatcaccggttcctggagggacgcggtgttcggtttcgtcatcatcatcaacacgggcatcggcatcgtcaccgaactcagggccaagcgcacgctggacaggctatccatcctcgtggcctccgacttcctcgtgcatcgtgacggcagggacgtggaggtgccccacaacgagatcgtgctcgacgacctgctgtggatccgcgccggcgaacaggtgccggccgacgggcagatcatccagacctggggactggaactcgacgaatccatgctcaccggcgaatctcgtaccgtgcgccacaaggtgggggagcaggtgtattccggtgccaccgcggtctccggcatggcattggtcaaggtcaatgcggtcggcagccattcctacgccgccacgctcaccgcgcaggccaaggtatacaagaaaaccgtgtccgacctgaacaagggcatcaacacgattctgaaattcatgaccttcctcgtggtaccgctgtgcattctgctgattctttcgcagattcatacggtcggcggttggggcacggcactctccaccggcgaatggcggcaagccgtggtttccgcggtcgccggcgtagtaggcatgattcccgaaggcttggtgctgctgacttcgctgaacttcgcggtggccgccatgcgtctcgcccgtcacaatacgctggtgcaggagcttgaatccgtggagacactggctcgcgtggacgcgctgaacctcgataaaaccggcacgatcaccgatggcggtatcgccttcaaccggctcgtgatgctcgattccgccaatgcggctgcggaacaggcagccacgcaggccctctacgactgctgcaacgaagagcagcccaacggcaccggccaagccgtactcgccgggctcaaggcccaaggatatggggcaggtgcggttgagtctcgtgtcccgttctcttcggcgcgcaaatggagtgcggtgcgtaaatccggcgagacctggtacatgggagcgccggaggtgattatttctgcgcttgagggtgactattcgtcggtgttgcagcaggttaacgagtatgccaatgacggcaaccgtgtgttgctggttgcgcggtctacagctcccctctccgaggggagctgtcgccagaagcgactgagggacgcagttgagggagccaatgtctcggacggcccgcaactggatgtgcaggctgagccggtggcgttggtgttgtgctctgagaagattcgcgaggacgccgagcggacgctcgcttggttccgtgagcagggtgtgcgctgtcgtgtgatttccggtgacaatccagtgaccgtgggtgccatcgcccgcagagtgaaactgacaggcgaccatgagccggtggcgatggacgcgcgcgaactgcccgaggacgtgaacgaactggcccgcgtgctcgaaaacgtcgatgtgctcggccgcgtgctgcctgaccagaagaaggccatagtgaaggcgctgcacacgcagaaccacgtggttgccatgaccggcgacggcgtcaacgacgcgctcgccatcaaggaggctgacctcggcatcgccatgggcaacgcggcacccgccaccaaagccgtggcccaagtggtgctggtggattccaagttctcgcacctgccggacgtcgtggcacgaggccgtcaggtcatggccaatatggagcgcgtggccagcctgttcctcgtcaaaaccgtgtactccgcgctgatctcgctcggcgtagtgctgacgcaaatcccatacccatacctgccgcgccatatcacctatatcggcgctctcaccatcggcatgcccgcgttcatcctggcgctcgcgccgaacacgcgccgctatattccgggattcctcaagcgcgtggtcacgttcgcgctgccgggcggcatcgccactgcgctgtcggtgttgctggccgcttgggtgctgccgccggtcatgggctggaacgtgaccggcgatgccacggacctgtccgccctgcgcgccaccagcgccatcatcctgttcgcgatgggcgtgttcgtgctggcccgcgtggccagaccactcaacggttggcgtggcgtgctggtggcggtgttcgcggcggcgggcgtgatcggcgcgttcgtcccgttcgtggcgaacttcttcgccctgattctgccgaccggcgccacgatggtggccacgctgatcgcgttggccggttccgcgctgatcttcgcgctgtgcctgtggctggcgccgctcgtgcgcggactgacgggcaagctctcgcgtcggcattgagacggcggcgcgattgtctcatacttcaagccgacacgccagagcctcggtaacgtgcccgtaccatgtgtagcggataatcagcggcatcataagccgattcatgatttcggaggaagcatgtccttacgcgacgaccagctggctaccctcaaggcagccggcaaggacttcgattactacaacatcgccaatctcgacggcatcgatcatctgccgtactcgctgaaggtactggtcgagaatctggtgcgcaacatcgacggtgccaacatcaccgacgagcacgtcaagaccctgctcgactgggatccgaacgccgaacccagccacgaaatccagttcacgccgtcccgcgtgatcatgcaggacttcaccggcgtgccctgcatcgtggacctcgccaccatgcgtgacgcggtcaaggacctcggcggcgacccggaggtcatcaacccgcaggtccagtccgatatggtcatcgaccattccgtgcagatcgacaagtacggcatcgccgacgcggtccagcaaaacatggacatcgaataccagcgcaacggtgaacgctaccagttcctgcgctggggtcagcaggcattcaagaacttccgcgtggtgccgccgggaaccggcattatccaccaggtcaacatcgaatacttggccaaggtggtcatgagcaaggccgaggccaacggcaacgcgctcgcctacctcgactcctgcgtgggcaccgactcgcacaccaccaccgaaaacggtctgggcgtgctcggctggggcgtcggcggcattgaagccgaggccgccatgctcggccagccgatctccatgctcgtgccgcgcgtggtcggcttcaagctcaccggctccatcccggagggcgttaccgccaccgatgtggtcctgaccatcaccgacatgctccgcaagcacggcgtggtcggtaagttcgtggaattctacggcgaaggcatcgcctccgtgccgctggccaaccgcgccaccatcggcaacatgggccccgagttcggctccacctgcggcatcttcccgattgacaatgtcacgctcgactacctgcgcctgaccggccgctccgaagagcaggtcgcgttggtcgaagcctacgccaaggccaacaagctgtggggcgacgcttccgacccggattacgtggaaccgcagtactccgaatacgaggaactcgacctcggtaccgtggtgccgtccatcgctggcccgaagcgcccgcaggaccgcattctgctgtccgaagccaagagcatgttcgagaagaccgcccccgcctacgagaccgagaagaccgtcaaggatccggtggccgtgtccaccgacttccgtggcgatttcgacatcgaaaacggcgacgtggccatcgcctcgatcacctcatgcaccaacacctccaacccgtccgtgatgatcgccgccggcctgatcgcccgcaacgcacatgccaggggccttaagcccaagccctgggtcaagacctcgctggctcccggctcgcaggtcgtggccgactacctcaaggccgcggggctgcaggacgacctcgatgcactcggctaccagctcgtcggcttcggctgcgccacctgcatcggcaactccggcccgctgctgcccgagatttccgaggcgatcaacgccaacgacctgaccgtcaccgccgtgctttccggcaaccgcaacttcgaaggccgcatcagcccggacgtcaagatgaactacctggcctccccgccgctggtcatcgcctacgcgctcgccggcacgatggacttcgacttcgagacccagccgctcggcaccgacgcggacggcaacgacgtgtacttgaaggacatctggcccaccaatgccgaggtcgccgccgtggtcgacggcagcgtgagccgcgagatgttcctcaaggactacgcctccgtgtttgacggcgaccaccgctggaagggcctcgacgtgccggaaggcgagctgttcgcgtggaacgacaagtccacctatgtgcgcaagcaaaccttcttcgacggcatgaaggccacgccggacccggtcgccgatatccacggcgcccgtgtgctggccctcctgggcgactcggtcaccaccgaccacatctccccggcaggcgcgttcaaggcctccagcccggccggcaagtacctgaccgagcgcggcgtggagccgaagaacttcaactcttacggttctcgccgaggcaaccacgagatcatggtgcgcggcacgttcggcaacatccgtctgcgcaaccagctgctcgcctccgtgggcgaggaggtgacgcctggcggcttcacctacgacttcctcgccaagaagccgaccacgatcttcgaagcctcccgcgactacatcgacaacaaggtgccgctcgtggtgctcgccggcaaggaatacggcaccggctcctcgcgcgactgggccgccaagggcacggtgatgctcggcgtcaaggccgtgatcaccgaaagcttcgagcgcatccaccgctccaacctgatcggcatgggcgtgctgccgctgcagttcccggcaggcgaatcctatgagtccctgggcctcaacggcaccgagacctacgatatcgccggcgtcgagaagctcaacgagggcgtgacccccaagacggtccacgtcaccgccacccacgaggacggctccaagaccgagttcgacgcggtggtccgcatcgacacgcccggtgaggccgactactaccgtaatggcggcatcctccagtacgtgctgcgcaacctcatgaagtaaccaccttcttggctcccctctcttgaggggagctgtcagcgaagctgactgaggggagcaaggccggtatccgccaacggataccggccttttccacgcatgccaaaatgctatactgtatagcatcttcgaaatggaggttgccatgaccatggtccaaatgaacgttcgcattgatgcgaaactgaagaacgaggtcgaagaagtcctcaagggcaaaggcgtatcggtgagtgacgtaatccggtcgctgtggttgtacatcgccgaccgcaaggaagtgccggcattggaaacgaccgccgaagagcaagcccgcgaggaggaaaagcagcgcaagctgaaactgattcgagaaggtgccggatacgtacacaaggaactggtcaaggccggactgatctcagaagacaccgacctcatggaaggccttacctacaagcagttccgcgacaaaatgtacgacgagcaacttgatacgtattacaacatgaagagggccgattgatgaccgacgtttccatgcagcgtattttgcttgataccaatgtactgttggactatttgctccatcgcgatgatcacgccaagatggcggaagcggttatggaacttggcgcgaagaacaacattacgttgttgtgcgcgtcattgtcgctgaaggatatcgcatacctatcatcatcggcgattcgtagggaattcaaaccgaatgaatcggaagtggagaatttcactcgcggctttctgtcgtcacgggtgccatggcgttgtatcgagcaggtgaaggagatgtgtgacatcgtcgctgtcgatgagtcgacatgtgataaggctttttccctgcaaaaacggcatcgggattttgaagatgatctgatcatcgttgccgcgcaacaatccggtgccaactgtgtggtcacatcggatgccgaattaatcagtcattttcccgaatattgcaaaacaccggctgaaatcgtggcggcgctggaataaatgagcgtgtggctcccctcacggagggggagccaccaatgacgtgccggcttactgtagcctactgcgcctgtaagcggaactgcttccagatgtcactgagcttctggccgttacgcgtgcgcttccacacgtccagaccgccgccgcgacgtcctccggcggcggcacgggccgcggcggtcggagtcggatattcggagccgtcatccagacggagacgaccgttttcggtgaccgtggcaaaccagcgctcgcccttgcgcggccgctcccacaccagacgttcgcccggcaccagaagacccgcgtcaatcacctgccggatcgtgacgcgccgcgaactatgagacggccgtggagaagtcttcgacaactcatcgacattctgcttggtcagatcgcgggcgtccttgtcataccggatgccccagtattccacgatgagtcggaccgcctcttcctgccgcgcttccagcaatgcgggtgtgcagtcagcgaaatccttcaactgattggtcagcgggaaacgacgtgaatccgcgcgcagcagcatgcggtcgcgacgtgccggatattcactcaacctgtccaactgatcctcagggccctgcaccagcgccatattgccgagtcggtacatccagaaatcatgctgatcctgcggccagtccgcaaacgatttcgaccgttcgatatccaacggcataatcggcagcgcactgaaccggcgtggtcgatccaactgcatgccggccttctgctcgttggcgcgaatcagcagcagacggaccaaatcgccgtcaccctgcatctcgccatgcaaacggaccaatgcgccttcacggtcgccgtccgagacatgcaacccgttcacgcgctggaccaaatagcccttgtcaagatcacggatggcggcgttcgcataaccgcgccgctccaacgctccagtgcgattcagcgtgcggatgccggtcacctgttccaatgcggtcagaatttccagcagccgacgctcgtcatgggcacccaacgattccagcgtggccgtggttctggcgatacgcgaggcacgaaccacaaacggcgacaaatcggcgtcgcccagcccgcgatacgaattgaccaacgcccacatggccacgggcttccactcgtggctgcggtaatcatccaacccctcaagccggctacgtacttcggcgggcaatatggtgtcgctggggcgcgcgatgatccgccatgccatcgcatagggtgccagtacttggttgatgaacgtgggcactgtgcctttgtcgatgtacggttgcagcacgtcggccaggaaatcctcgatgagcttgtcggtggccggcttgtgcgtgagcacgagatgcagataggcgaagaattcctcacagtcatgcggatcgtcgccaagcgggtcaatgatgtcatcccagcgggcggcgtacacgtcaagttcggcggtcgacaggccggccgtggcgcgcgccttgaacacgtctgacggggtgagcggcaggccgcgcatgttcatcacgtcgaagatgcgatgcgcgccgtcgagatcgtcggtggtcacgatgacgagcgtcacctcgttgaccagatactgcgcgaattgctggcgtccggcatccgaccaattggagatctcgtcgtacgtcttgcggatgttggcgacgatattgcgttgcgcagcggtcgccagatcgtcgtcgttcatgtcgaacacggattcgaggttgtcctcctgcacgtgttcgcggaagaacgccgcgtcgcgctcgcgcaacgtgaggcgaggctcggtgacgatgccgcgcagcttgtcgccgggctccaccagcagcgcgtcgagttggcgcatgaggtccgggtctcgctccagatcgcgcaacacggcgatgatgatcgacagggataccagccgctgctgcccgtcgattacgtcgtaacggttatcgccctcgcgcaccagaattagcgagccgaggaagtacggagtaccgggcgacttgcaggcgtcatccaagtcgcttaccagttgcaggatgttctcggtcttccagatgtaggcccgctggaatgaggggatcgtgaaccggaaatccggggtgaacactttcccgagtggtagttccttcgcactgattgccatgtcagccccttcgtcgccggcctgtggacggtatgccggcataccaacttgtgctcaagcctaccagtgtttgcccgacggcgggcacatcacgccggctcgggcaccgacccctcatacaagtagaacgaagacgggttttctcccggcacggatgcgggcagtgactgctcgcacacctgcgtcaggccgcgatgcacatagaacccgacatcgcatgtggtgtccgtgaacaggaagtagtcgcgcacgccggccaggcggaacgcgtccatcagcgtctcgaacatgcgccggcccagcccgtggccgcgcgccgccgggtcaagtacgaacagcaccacttccgccgcatagtcatgcccggcgctcgcggcctgggcgcgcagccgtttgtcgatgccgagaatgcccagaatctcgccggcggccttgattccgcccttcgcgaacacgagccgcgccagcgcgttccacgagttgatccgatgcgagttgagcgggctccgatggtccagcgcatcgacgcgccccacgatcagggcgaccggctggccgtccagttcggcgacgaacgcgttggtggtgcgcgccagacagttctcccagtccgcttcggccgccagcagaccggtccgctcatcgaattcggcataccaggtgcggcgcaccaggtcgatcagcgccggatagtcatccctacgtaatgttcgaataatcgcttcactcatattcccattatgactgatacggctcaacaaccggacgacttacagccgcgccggcagatcggcccgctccaccagccgcgccatctgcacgcggcccatgtcgagcttgttcgccgcggaagaaagatgcgccttcgccgtacgctccgaaatgaacatgcgggaggcgatttcggcgttcgtatagccctcggccgccagcatcacggcctcgcgctcgcggtcgggcagcgcgtcgagcagggcgcgcgcctcatcgcggcgcgaacgcggccgcgtgacgctcagatcgtcgatcagctgtttctgactggccgtgttgaactgcggcgcgccctcgcataccccgatgatgcggcggatgatatcgtccgccgcatcggttttcgacacgaacccctcggcgcccgcctccaccgcgcgttccacggtgccggacggactcaacgaggtcaggatcagcacgtgcggcgcgggggagagcgagcgcagcagacgggtcgcctcgatgccgtccacgccgggcatggcgatgtccatcagcaccacatccggcttttcctcggcagcccgcctcacgcaggtctcgccatcggtggacgtggagacgacttcgatgcgcccgtgagaataatcgttgaggatcaggctcatcgcctggcagatcatcggatcgtcatcgatgacgctgacccggatcggcttgggctctaagccggtgccgcttccggtcagaccgccgcgttcgggctttccaccagacacactattcccgttcttctcactcacgctagccatcttagctgcgccaaggcagttgcacgtcgacatggaacaggtgccgatcgtccatcccataccggcattgcccgttgaccgagtgcacgcgcgctgccaaaccaggcagtccggccccatgggcccgctgcgtctcggtcgcatccgtggcgatcggattgctgatatggatatgtacgcccgcctgcggcgtggcggagacctccaacgacaccggcgctccgggcgcgtgccgccgcgcgttcgtcaatccctcctggatcgcgcggtaggccaccttgccgattgactcatccatcacgctcagctgctggatatcgatccaggtgttgagcgacgtgcccgagttgcgcgtgtccgcaatcagcgcatccagcgattcgcgggtcagcgacgtgtcgtcggacggggcgagctgctcccatgcctggtgcgggttgcgcagcatgtcgatgatcgagtgggcctcgtccaatgccccggccgactgccgacggatgtcctcggccttatccgccaacgattgcgcttcgggggagtcgccgagcttggccgcctccgccttgagcgcgctggcgttcagggccatcagggacagggaatgcgcgagggtgtcgtgcgcttcggctgcgatggcgtcggcgagctgctggttggtcaggtcggtctgcagggtcgcggcatgcgtggtggccgcgctggccaccgcattcgccgtgcgcaggcgggcgcgcgaacggatatgcaggccgatgagcgtagcgatggtcacgaacaccagtgaggccaccgtggcggtgatgatgacggtcggctcctccaccagcatcaccatcggggagcctgaatcgccgccggtatgcggttgagcgaaaatcagatgccaaatcgaggctttgggctgttgcagggcgtcgcggagctgggagatgagcgtcacgatggtgccgccaaccgtggcgcggatggtcgtgttccggtttgaacgacgggcgagcaatgaggtcatcgccatcagtgcgatgagcgagtcatacgggaacacgaccaccagcgcgcaggcgatccagaacgtcgcctccgggtattcgctgcgggccaagagcaggaaccctgccgggaatgccagcaaggtgcagaggaccatcagcgtgtatcctgcggaatcctgcgcaaaattctgggcgaagaacgaggtttgcgccatgcacatgaaactggccaatggcaccataacgaccgaacaccatacgcgcgtagtcacgggcacctcgtccgtatccggtgtaggaaccggggaccccgtgccgggcatagggcgagcgtcaggccgtgagccgggtcggaaaccggggtatggcccggcggcgcgttgtgggttcgtcatgctttccactgtatgacctgcatccggcccccgccactggacatgcgggcaccgttatcacctccgtattgcccgaacaggcaacgaacaatgaccgttcgtccactaacgtcgctgtttcgcggccggtagcgtcgtgctcacatccctatttcggggaagatacgagaaggagcacatcatgtccaaccacaacatcgccccgcagccggttccctcatccccacagcagtaccagccacaacagcctcagcctcagccgccgcaaccgcaacatctgcataccaccatctgcggcatcgcggccgtggtgtttggcgcgttgggtttggtgctgagttttattcccatcgtcaacaatatcgccgcaatccttggcttcatcggcgtcatactggcgattatcgccatagtgggcaccttccggggcaagaaacgcggcaaggtgctgtccattgtggcggcggtgctgtcggtgttggccattgtgatcacgctggccatgcagtccgctgccagcaaggccattgacgattccattaaggagtccaagggcatcgacacgtcacaatcctcatcatcaaagtccgcgggcaaatcgtctgatgcctccaagagcaaggcatccgagcagaaagcgcagggcgagcaggatttggaaggtgatatcgaaggtgcccacgtgaaaatagtctccgccgtgaaaagcgtcaacgactataacggcaagcccaccgctctggtgacttatgaatggacgaacaacacgtccaagaacaactcgttcgccactttggctcacccgaacgtgttccagaacggcaccgaactggagacggcagtatacttcgatcagcctgaaggctatgacgcgaattcgtatttggcccaagcacagcccgggaccgcggcaacggtgacgctgggctatgtgctgcaagacgattcgccgattacggtggatgtcactgcgttcctatcaacggatcaagacaccaaggtgacgcataccttcacgttgcagtgaatcgcgcggcggtccaagctgcgatcgaatgtcaatcgaatctcaagtgcatgccacgcgcatggcggaaacgcccgttacgctttgagatgagcagaacgagccgatcgatcatattcatggaatgttcagctttgttcctctaagattggtactggaacaaacgctaaaggagcgattatgacattcggtcagcagccccagaacaacgggcaatacaacccgcaatacaacacgcctgattacaacgccgcccaacagtctggatatggccagcaatacgcacagtccggttacggccagaactactatgcccagccgcagggcgctcccacctaccaatacgtgccgcagggtactggtgccggtgcgggtgcggccaccatcaacacgacgatgacctacaactatgaggaagcccgccgagtctcagtgaccaaggtgtacggcgagatgaccatcggcatcctcgtcaccgccgtggtcgccgtgctcggccagatcactggagcctactacagcttcctcatggccaccggcatggtgggcctcatcggcctgtgcgtggtgcagattgccctggccgtggtgctcggcatgcgcgtcaccaagatgaagtcggccaccgcgcgcgtcatgttctatgtgtacgccgcattgatgggcttcaccttgagctcgatcttcatggtctacgacctcggctcgatcggcgtggcactcggtgtcaccgccgcgttcttctttgcgctgaccatgttcggcatgactaccaagttcaacatgctcaaggccggcccgatcctgatgatcggcctgattgtgctcatcatctcgcagatcgtgctcgccttcgtgcaggtcgacggcatgaccaagatcgtctgcgccatcggcctgatcctgttcgccggcatgaccatctacgacgcgcagtccacgcgcgcgctgctgaccgaatacgaggcccagggcccggaaatggtcaagaagatctccatcctgtgcgccctgaacctgtacctcgacttcgtgaacatgttcctgtacatcctgcagctgctcggcaacagggactagcctcgacagccgattggcgagcggcatgtagcctgcccgtcaaacgtcacagcccgaccacattgtggccgggctttttcatgtctgtcacattcgcacgttaggctggctccccgtgaaaagacaagaactcgtaggcatgctgagcctgttgttgaccgcgctgatctggggttttgcgttcgtggcgcaggtccagggcatggattcgatgtcgccgatgttcttcaacgccgcgcgcttcacgctgggagcactgtctttggtgccgattctgctgtggatgcgtggccgggggagcgcggataagggcgatacagccggggccgatgtcgttgggaccgaggcatccgtggccgtctccacagatgccgcatcgaacggtgcatccgacgtcgttaccatcaccggtgccaagctgaatgcgaacaagcccgattcggccgtggcgcgattgctcgccaacccggtggtcatttccgtgatctgcggcatcgtgctgttcaccgccagcaccctgcagcagtatggcattctgtacggcaaatcggccggccgtgcgggattcctgaccgccatgtacatcgtgatggtgccgttgctggccttcgtgttcctgcgccggcgcatcggcatgctggtgttcgtggccgtggcgctgtccatcgccggcttctatctgctgtgcatcaccgatggtttcggttcgatcggcctggcggatatcctgctcgtgttcacggccgtgctgttcgccgtgcatattctggtgatcgatactttgggcggcaccgtggacgccatcaagctttcattcggccagttctgcaccaccgccgtgctgagctgggcgggttcgctgatcgaaggctcggtcgactgggccggcgctgctcattcctggattccgattctgtacgccggcatcggctcggtgggcatcgcgtacaccttgcaggtggtcggccagcaatgggtgccaccgacgcgagccagcctgctgatgagcctcgaatcgttcttctcggcggtaggcggtgcgttgcttctcggtgaagtgatgaccccgcgcggctacctcggctgcgccctcatcttcctcggcaccctactggcccaagcgccggccaggctgccgaagtggccgcaacggtgaatgaatcggccgcaggccgattccatagcacctcagtccgaggtcttaggcgcttcgcccacttgcggcgcgccgttgatgtcgcggtggatgttctgcatctgtacctcgatgttctgcaatgagcgcgcgcagtcgagcagcgtctgggaatgctcggcgagcttgttgtccggcaaatcggtcttgtagcgcagcgcatgctccagcgacgcccaataatccatggcgatggtgcggaactgcacctccaccggcgtgtaatgcgcgcccgaggagaggaacacgggcaccgcgtagattacgtgcaatgaacgatacccgttctgtttcgggttcttgatgtaatccttgacgcgcagcacctgaatatcggactgcgacgacagatagttggacacggaatacacgtcgtcgcggtaattacagatcacgcggatgccggccacatcgaacagattgtccttaatcgaattgacgccgatcggcagacccttgcgctccagtttgccgatgatcgagctcaccgacttcagacggcgttccatatgatgtatcgggtcatggctgaaccgcacctggaactcgtcgtcgagaatctccagtttggtgctgatctcgtacatcgcgccttcatacacctgcatgaggtcaacgaattcaacgacctgttcgggagtgaaggtgcctcccggaagatccaacgctttgagacgggcttgcagatcggaggttttgagtcggctatgtcggtcaagtatcacgtccaccaatatactcggcggattccagccaatctggacgttcgcggggaatctttccaagaacccataatttgacatcgtgacaaccaatggcatacgtgaccggagcatgacgaaccccgtcgatagaatcggtcgttatgaatgaagacatgatgaccgaggcggagcgcgcctcgattgcagccgatggaaccgatggtttgctggggaaacgcggcaagggcgtgttccatatccatacgctcggctgccagatgaacgtgcacgattccgagcgcatcgccggcgtgctggaggccaatggctacgtgcctgcaaccgaggaccagatcaatgacaatgacctcgatttgctggtgctcaatacctgtgcggtacgcgagaacgcagccgaacgcatgtatggcaccattggccgattcaatcgcgtcaaactggttcggccgaacctgcagatcgccgttggcggctgcatggcccagcttgaccgcaagaagatcgcggatactgcgccatgggtttccgcggtgttcggtaccaagaacatcgaagatctgcccaagctgttggatcagaatcgtgcgaccggcaaggcgcaggtccaggtcactgaacaattgcggcagttcccgagccagcttcccgccgcccgcgcctcccgcatcagctcgtgggtggcgatttccgtgggctgcaataacacctgcacgttctgtattgtgcccaccacgcgaggcaaggaaaaggaccgccgccccggtgacattcttgatgagattcgccaatgtgtggccgatggtgccaaggaggttacgcttctcggccagaacgtgaattcgttcggttatggtattggcgatcgatacgctttcagcaagctgttgcgcgcctgcggcaccatcgacggtctcgaacgcgtgcgcttcacctcgccgcacccggccgccttcaccgacgacgtcatcgccgcgatggccgaaacgccgaacatcatgcaccagctgcacttcccgctgcagtccggctccgaccgcatcctgcgcgcgatgcgccgctcctaccgctccgccaagttcctcgacatactgggccgcatccgcgccgccatgcccgacgcgcagatctccaccgacatcatcgtcggcttccccggcgaaaccgaagaggacttccagcagaccatggacgtggtgcgccaggcgcgcttctcctcggcgttcacgttcatctactcgccacgccccggcacgccggccgccgcaatggaacagattccgcgcgacgtggtgcaggaccggttcgaccgtctggtggcgttgcaggagcagatcaccgaagagaacctcgccacattcgagggccgcgacgtcgaagtgatgatcaccggcaaactcggcaagaaggacaccgacacccaccgtgtcaccggccgcgagaaaaccggcgtgctggtgcacatcggcgtgcctgaaggcgaaccggtacctgaaatcggcgatttcgtcacggccaccgtcacacacgccggccgccataatctgcttgccgaccccgacgtggccgccggccagacctattccgtgcggcactgagggggcgtatatgacgcaacgagtcgtctccatcgtcggtcccaccgcgtccggcaagacggggttgggcatcgccatcgcccggcgtctggccgaagcgggggagcgggccgaaatcgtgaacgcggacgcctaccagatgtaccgtggcatggatatcggcaccgccaaacccaccgccgaggaacaggcggccgtgccgcaccatctcatcgacatcatcgaccccgaagacacgatgagcgtggcccgattccagcagcttgcgcgcgagaccatcgccgacctgcaatcacgtggcatccggccgattctcgtcggcggctccggcttgtacgccagagcggccatcgatgacatcaccttccccggcaccgatcccgacgtgcgcacacgtcttgaggaacgcgagaaaaccgagggtgccggtgctttgttcgacgagttgcgggccaaagaccccgaggccgccgcgcgcatggacccacgcaatccacgccgcaccatccgtgcgctggaggtcatcgagcttaccggcaaaccgtattcggccagtctgccgcgctaccggtacgtgattccgtccgtgcagatcggactcgacctggaccgcccggatttggaccatcgcatcgatttgcgcaccaagcagatgtatgacgatgggttcatcgaagaagtcgaacggttgcgcccgcatctgggtgccaccgccgtacgtgcgctcggctatcagcagatcatcgacctgctggacggcatctgggatgtgaacgacgccttcgcggacatcgcacagaaaaccaagcgactcgcccgcaaacagatgggatggttcggccgtgacccgcgcatccactggctgcaggccctgaacccgaaactggtcgacaacgcgatggccattatcgcgcacgccgacgccggcgactacgacccgatcgacgcccgagccgacgaatacacccagcatcatctgggcgatatcacggcgtaggaatcagccaaaggccgatgcaatcacccgcaatcagtgtgcaggcccctgattccagccggcgatcaagaacacacgcgtcggattcgccgggcgtagtatcgcgtcgaacatcgtctccagtgcagacgtgtcgccccgatatgccgagtgcttggcggagcgatactcctcgcgcgtcactgagccccagtcgagatcccagccggcgtcatgcgccaagcgtgaaccgaatatacgcagcaccatcgcattgccgccacggaacggatgcagataaccgagctcatcataaatagaagcgaacgcgtgaacgaacacgtcgcgatccaacgcatgcaggttgcgcttgtccgccaactccatcgcgatgttgtgcgcgccggtctcaatgagcccagccgggaagaacgcctcaggattcgcggctcgagcccggtcgttcgtcacctcgcgtgtggtgtttgaggtacgcaacttgcccgcatcctcaaacacgccttcgaacagccccttatgaatggcggtcagctcatccaagtcgccagacggattccatcgacgttccgccaacaacacggtacgtgcgaacaccgcatccgcccgatccgtggcatgatcatccagactgccggcagccagacgatcctttccggcagggtcggcggcggcgcgcagacgcatggcagtctgttcgtccgccacgtcgatgagatgggtcacgggcttcaagccgcgttcgtaggcagccgcggcgcgcatcgttgcctcgcccggcgtcatcgcttccagtgcgcagttcttgagtgcaaatgcgactgcgctcgcacgctctgcgggtgtcatgcaacccatgataaggcatattcgcgccccagcggggaatcgactcagacgaacgcggcgaatcggctgtcgggattcgtcaatcgaccatatcgtcacggtgtcgtcaccaaccatgcacccccgtactagtagaatcagacccgatatggcacgaacagcatcctccaacagcaccaaaccccgtaaatccaaagacaacgggtctacccatgatggcgaaaccaaggtccagcccgagcttgacctcgaacctgagccgttgtggaagaagatcctgctcgcgattccgcgcgcgttcggctccggcgtacgcgccgtcaccggcgtcggcgaatacgatccagcctaccgtcgtgatggtttgtgcttcctgctgctcgtgctcgccgtactgttctgcgcgtccgaatggttccgcgtcagcggtccattcggccagctgcttcacgccatcgcggccggtgtgcttggtctgatgagcgtcgtgctgccggtgttgctcgccgccgtggccttccgactcatgcgcaattccggtaaagggtccaataacccgcgtgtggtcaccggttgggtgctgctcatgtggtcgatttgttcgatcatcgacgtggcgatcgccgccgaccacaccggattcgacatcacgattctgcaatccgccggcggcctgttcggcttcttcctcggctcaccgctcgcctggggcctttccaacgtgttcgccatcatcattttcgtggtcgtcggcctgttctccttgctgatgattaccggcacccacgtcaccgatttgccggaggatgcgcgcaaaatcgccgctaaaatccaacgcaaaccgtatgtgccgatgggccaggagacggatgggagcgccagccagttccccaacgaggtccgtgtgggagataccactctcgcctttgccgacggtgttccctcgcatgacggcgacgatgacggaagcgacaacgatcaggccggcgatgcacggcccagcctgttcgcacgactgttcggccgcaaatccaagaccgaagacgacaaaactcttgacaagtatgctgccgacgatccattcgaccgtgccgccagccagcatggtgccaccgccgaaaccccggtggtcgatccgatgaccggcgagattatcggtgcgcgaaccattgcatcgtcttcgtacgacggccgtccgcacctatccagccctgcgcctgctgccgatgcagatgatggcgacgcttcccgaacccgcgtcatcaccagtggccagaccgtcgccatgcccggtgggggagcggtagacgacccgtgggcacccagtgccgcccaggccggtactgtcgcgctcgcaggggcagccggtgcgatgggagcggccggagccgccggtgccgcggctgcggcagccgcgaccggagcctacgcgggtgccgatgcggacggcagcggagtcggccagggcgtgcccaatacgggcggccagccgaatgccaccgccggcaacgatacagacgacgacgccaataggccgtatcagttgcccgacctgaacctgctgaccaaaggccagccccatgcgatgcgcaccccggccaacgatcgcgtgatccgggcgctgacttccaccttcgaacagttcaacgtggatgccaaagtcgtcggcttcctgcgtggcccctcggtcacccaatatgaggtcgagcttggccccggcgtcaaggtggagaaagtcaccaacctgcagcgcaacatcgcctacgcggtggccagttcggatgtgcgtatcctttcaccgattcccggcaagtccgccatcggcatcgaaatcccgaacgaggatcgcgaaatcgtgcacttgggcgacgtactgcgctccgacaaggccgtgggcgacccgaacccgatgctctccggcatcggcaaggacgtcgaaggccacttcgtgaccgccgacctgaccaagatgccgcacctgctggtggccggtgccaccggttccggtaagtcgagttttatcaactcgatgctcacttcgatcatcatgcgtgccacgcccgaacaggtgcgtctgatcatggtggatcccaagcgcgtggaactgtccgcctacgcaggcatcccgcacctgctgaccccgatcatcaccgatccgaagaaagccgcacaggccctcgaatgggtggtcaaagagatggatgcacgctactccgacctcgaattcttcggattccgccacgtcaaggacttcaacgaggccgtgcgcgccggcaaggtacatgcgcccgccggctcccagcgcaaggtggccccctatccgtacatcctcgtggtggtcgacgagatggccgaccttatgatggtggccaagaacgatgtggaaagctccatccagcgcatcacccagctggcacgagccgccggtgtgcatctggtgctcgccacccagcgtccgtccgtggacgtggtcaccggtctgatcaaggccaacattccatcccgactggcgttcgccacctcgtccgccaccgattcgcgagtcattcttgacacggtcggtgccgagaccctgattggtcagggcgatgcgttgttcctgccgatgggttccgccaagccgattcgtgtgcagggctcgtgggtgtccgaatccgagattcgcaaggccgtggagttcgtgcgcacccagcgcaagccgaaataccgcgaagacatcgaacagatggccaaggaagccgaaaagaaagacagcatggagcccgacgaggagatcggcgacgacatggacgtgctgctgcaggccgccgaactcgtggtcaccagccaattcggctccacctcgatgctgcagcgcaagctcagggtcggcttcgccaaggccggccgactcatggacctgctcgaatcgcgtggcgtggtcgggccgtccgaaggctcgaaggcccgcgaagtgctcgtccagccgcaggacctgccgcaggtgctcgccttcatccgaggcgaaaccagctcgctcgaagccaccgccccgcaacagcccgaactcggcgaataattcacccatcgaccttcctctgatgagggaggtgccccgaaggggcggagagagaagcgcggccacgcggccatcagcacgcaacctgattcccgaataatggcagtcaatatccagccaatactcactcaaggtagaagtgtgggggtaacgtgaacactatggatgagaacacaatggacaagcagtcatcgcccaaatcatcgctgttcgacggatggaacgcgccgccgaacctggtcacctactcgcgcatcgtactcgtggtgtttttcctgacactcgacattctcgccggtgcctggggtgagaacaacctgaccatgcgctgggtcgccgcggtgctgttcatcatcgccgcgtccaccgataaaatcgacggttggatggcccgcaaatacaatcaggtcaccgaaatgggcaagctcatggatccgatcgcggacaagctgctcacttgcggcgcaatgattgtatgctccgcgttcggcgagctcggctggtgggtaaccatcctgttcctgattcgcgaaattggtatcaccgttatgcgtttcttcgtcatggagcgtccgggcggcaaagtcatcgccgccgcatggcccggcaagctcaagaccgtattccagtgcgtgggtctgtccatgctgctgctgccgttctggtctctgggtaacggacaagccacgccgttctggatgaccgcttactacttcctgacctacgccatcatctacgtggcattggtcctgtgcctctactcgggtgccgtgtacctgtacaacacgttcgtcgccccgaagcggaagtgacggatattccaatgcgggaattgtgcgacagtctcgcggccggcatcctcaagatttgcgaggcgaacaatacgaaaatcgcctgcgctgaatccctgaccggtggcctgcttgccgatgcgttcgtgcgtattcccggcgcctccaacgtgttgttgggctccgctgtcacttacgacatcaatgccaaggcctcgatcctgcacgtggacaaggccctattggatcgagaaggtgccgtacaccccgaagtcgcccggcagatggccgtcggtaccgctcgcctatacagccagccggaatacggcgaccgaatcatcggcctttccaccaccggcgtggccggccccggtccggacggtgacaagccggccggactggtgtatgtgggcctgcgcatccccgcaagcctcaccccggaccatgccgaagtgctcaaagccgtcgaactccatcttgatggcatgcgcgaagaggttcgtcgcctcaccgtattccacgttctgcaaaacttgagtctattcacagcaagttttaaggaataaaaccgttgggttgtcgtgttgtacatagtggaaacactgaaccgacctgggaaggggcgatggcgatggaaacgatgacccgagtgaacgaacagatggatgtggccgccaagaagccgatggctgtgcagccgggtgtcgcccgtatgcgtgaactgactccggcccagcgccgtgcggtgatgttcgcccagcagcaggtgctcaaggcacaggccgccaagaaggccaaggatcagcgtcaagccgttcgtgaacgtatgtgggatgaggattcgccgtcgtacaagccgactgccgccgccgagcccgtggtggctgaggaggagcctcgcgagttttcgctgcgtggtgctatcggtcatgtgctgcgcgagctgcgcacgcgcgatcgccgcacgttgcgtgaagtctccgagaaggcaggcgtttcgctaggctacctttccgaagtcgaacgtggacagaaggaagccagctccgaactgctgagctccatcgccgatgcgctcggagtctccacttcgcgcatgctgcgcatggtggctgattatctcgactcggtcgagggctgatcggttggcggtgtgaagccgcgtcccgtaatctatgtctagctgtgaacccgtatcgcttgtggcgatgcgggtttttgctgtcctgcggttggtggcacactggcgtgtatgcgtgaacgggaattctgggaattacttgaagaggtgttcggtcggacctacggtcgttcgctgtcgcgtgatcaacggatgcccaaactggcgaatatgaccgtggtcgaggcgctggacgcgggggaggagccacgcgtggtctggaatgtgctctgcgaccaaatggaggttccggactccaagcgttggggccacgatcataacgcgccgcccatgcccgccgtctgacactgcgggattacggagtcgctgaatcgtgaaattggcgatttcggcgtgttgcacgccaaattcgaacaaatgttcgtgtgtgtggttatagttatccacagtgacaagaagccgcatacgtgtgcacagggtgcttgccatctgccataatccttaccgcagtagggcttaaggaggccaggtggccaagctcgggcaagctggaaccacaatggttggtttggattgcctcacatggcatgtccgtcatacggtggaggcatccgattcgcacacgacttcgacaaggagaagatcatggcacttgagaccaagccggccaaggacccggcagccgaggacaagcacgagctcgatcccaagcgcaaggcggcgctggacaccgcgctggcgcaggtcgagaagagttttggcaaaggttccgcaatgcgactgggcgaccagcccgagcagaacgtcgaggtgattcccaccggttcgttggctctcgatatggcactcggcatcggcggcctacccaagggccgcatcgtggagatctacggccccgaatcatccggtaagaccacgctcgcattgcatgtggtggccaatgcccagaagaagggcggcgtggcggcctacatcgatgccgaacacgcgctcgacccggcctacgcccgcaagctcggcgtggacaccgactcactcatcgtctcccagccggataacggcgagcaggccctcgaaatcgctgacatgctgattcgctccggtgcgcttgacgtcatcgtcatcgactcggtcgccgctttggtgccgaaggccgaaatcgaaggcgaaatgggagacagccatgttggtttgcaggcccgactcatgagtcaggcgctgcgcaagatgaccggcgcgttggctcaggccggcaccaccgccatcttcatcaaccagctgcgtgagaagatcggcgtgttcttcggcaaccctgaaaccaccaccggtggtaaagctctgaagttctacgcctccgtgcgtctcgacatccgccgcatccagaccttgaagaacggcgacgaagcggtgggcaaccgcacgcgcgtcaaggtggtcaagaacaagatggccccgcctttcaagtccgccgaattcgacatgctctacggtgaaggcatttcccgtgagggctcggtgatcgacatggcccagcaggttggcgtggtcaagaagtccggttcgtggttcacctatgagggtgatcagctcggtcagggacgagagaaggtccgtcagttccttaaggacaacccggccatcaccgaggagattgagaacaaggtcaaggccgagttcggtctgatcggttccgccgatcagttcgcggaagatggcgaagccgcagcagcggccgccgtcagcgaggctgctgcggctgacgtggccaaggacagcaaggccgcagcggcgcctgctgccaaaacgacccgtgccaaggccggcacagctaaggcctgaacatgattagtgccgaagcgttcttgcggcgcaatcctgttgcgtcgcaagacatgcccattgccgagcagcatgttcagtcgaaaccgtcgggacgtttttctcgacgggggagagacgctgccgttgtcgaagatcccaatgatttggacgcttgccgcgaggctgcattgcgtttgctggacgcggccccgcgtgcatccggtgcgttacgcgaacgattgcttgccaaagggtacggcgaggcgatcgtggacgaggtcatcgaacggctgattcgcgtgcaactgattgacgacggcgcttatgccgaatcggccgtacgctattgtgccggtcgcatgatgggccgtcgtggtacggtcatggaacttgctcgcaaaggtgtggaccgcaagctggctgaacaggtgtgtgacgaagctgaacaaaatggcatctttgaagatgccgcatgggaattgggccgccaaatagcccgcaaaacccatggcctcgatcgtcgggtccgtcagcgtcggctttggtccgccggcggccgcaaaggccacagccccgaaaccctccgtcgagtcgccgccgcattgttggtgtagccaagaaaaaaatgagacctcttataccccgggttctgtcgtgccgtgcgcgaacgcacggcacggatggccatccatctcgacctgacgttaccgccaggctctagcagcctacccgatgacacgggcgagcagcccttaccgccatctgcttggccttgctcccgatgaggcttgccatgcgacctactgttaccagaggcccggtggtctcttacaccgccgtttcacccttacccgtcgaggacgggcggtctgttctctgttgcgctatctctcaggtcaccctgggcggacgttatccgccatcgtgctctatggagcccggaagttcctcagccgatcccaatgaagatcacggccgcggccatcaagaggtctcaagcttgcaattatacataaggtgcggaaaaggcggcatcccgccctgcggtgaggccatgccgttgcccggttatcctgttttctccatggttgggcatagttgggcgattcgtgaacgacgcgccgaatatcggatggggcgtgtcgggcgtgttgtggcgtgtcgtatggagacgaatcaaatctgtaagagcttggtatgtgcgagaaagagcaagaaaacgctgcctatccattgcagtatttaccatgacgaacaaacgagccagcctgataaaccggtatcaaatcttcttataggagactgctgccaaagccccagtatatacatcgtttcattgcagagaaaagcccgggaataaacatatattctctgggcgagtttccggccgttcacccattgttcgtctacaatgaaacatacccggtcggtgatgatgccgttcggaacacatatagcgggttacaccgcttgagttagaggaggtcaacatggaaatcgtcgttaccggacgccacacgcaggtcaagcaaaggttccgtgatgtggtcgagaccaagatgaatcgtgtgaccgctatcgccccggatgctcagcgcgcgcagatcgtgctgacccatgagggcaacccgcgtcaggccgataccgccaagcgcgtggaaatcaccgttatcgccggacgtaccgtggtgcgtgcggaggcttccagcaccgatgaattcagcgcgctggacatggcgctggataagttgacgctgcgtctgcgtcgtactcgtgaccgtcgcaaggatcaccgtcgtggttacgcgaacccggtcccggtggatctgggtgttatcgccccggagcccgagccggaggtgtcggaggaagagccgaacaacagcccgcaggctgcggtcgcctccgatcttggccctggcgaatccgtggaggtccaggttggggatacgccgattgtcatccgtcgcaagctgcacatcgccgagcctatgagcatcgacgaggcgctgtacgagatggaactgatcggacacgacttcttcctgttcgtgaacaaggagaccggacgcccgtccgtcgtctaccaccgtcacggttggagctacggcgtgttcgaaatcgacactccggagaatgtcaagaaagcctgaaggtaaggcctgctgacacgatcagctgataccgcatggaccgcttccaatatggaggcggtccattttttcgtaaaaaggtcgaaaaattcgactgctgacggtgtgaggcgctatcctgatacgcggacaccaccacttatcagtcaagggagaacccagtggtcgatattattgacaaagccctgcgaatgggtgaaggccaccagctcaagaagctggagaacgtggccaaggccgtgaacgctcttgaggacgagatctccgccctctctgacgaggatctgaaggcccaaaccccgaagttcaagcaggaaatcgaaaacggcaagagcctggacgagatcatgcccgaggcgttcgccaccgtgcgcgaggtctccaagcgcacccttggccagcgtcacttcgacgtgcagctcatgggcggtgctgccctgcactggggcaacatcgccgaaatgaagaccggtgaaggcaagaccctggtcgccaccctgcccacctatctgaacgctctcgaaggcaggggcgtgcacgtggtcaccgtcaacgactacctcgccagctaccagagcgagctgatgggccgtatctaccgtttcctcggcatgaacgtcggctgcatcatcaccgagcagaagccgccggagcgccgcaagcagtacaacgctgacatcacctacggcaccaacaacgagttcggcttcgactacctgcgtgacaacatggcatgggagaaggccgacctcgtgcagcgcggtcaccactacgccatcgtcgatgaggtcgattccatcctcatcgatgaggcccgtaccccgcttatcatctccggcccggccgaaggcgacgtgacccgctggtaccgtcagttcgccaagctggtgctgaagctcacccgcgacgaggactacgacgtcgacgagaagaagaaggtcgtcggcatcctggacccgggcatcaccaaggtcgaggacttcctcggcatcgacaacctgtatgagccggccaacaccgccctgatcggctacctcaacaacgccatcaaggccaaggaactgttcctgcgtgacaaggactacgtcgtcacccagggcgaggtgctcatcgtcgacgagcacaccggccgtatcctgccgggccgccgctacaacgagggtctgcaccaggccatcgaggccaaggaaggcgtggaggtcaaggccgagaaccagaccttcgccaccatcaccctgcagaactacttccgtatgtacgacaagctcgcgggcatgaccggtacggccgaaaccgaggccgccgagttcatgaacacctacaagctgggcgtgctgccgatcaagaccaacaagccgatgatccgcaaggaccaggacgacctcatctaccgcaccaagaaggagaagctggccgccatcgtcaaggacgtggccaagcgtcacgccaagggccagccggtgctgctcggtaccgcttccgtggaaagctccgaagtggtctccaccctgctcgacgtggccaagatccctcaccaggtcctgaacgccaagcagcatgagaaggaagccgccgtggtcgccgtcgccggccgcaagggagccgtcaccgtggccaccaacatggccggccgtggtaccgacatcatgctcggcggtaacgtcgagttccttgccgacgccaagctgaagtccgagggctactctccggaggacaccccggaagagtatgagaagcgttggccgggcaccctgaacgagatcaaggcccaggtcaaggacgagcatgaggaggtcaaggagctgggcggcctgtacgtgctcggcaccgagcgccacgagtcccgtcgaatcgacaaccagctgcgcggtcgttccggccgtcagggcgatccaggcgagtcccgcttctacctgtcgctggaagacgatctgatgcgtctgttcaacacccagctggtggcccaggtcatggccaagggcatggaggaaggccagccgatcgaggccaagtccgtgaccaagggcgtgcgcaccgcacagaaggccgtcgaatcccgcaactacgagattcgtaagaacgtgctgaagtacgacgacgtgatgaacaagcagcgtaccgtcatctactccgagcgtcaggccgtgctcaagggcgaagacatccacaaggacatcctgcgtttcatttccgacaccgtcgagtcctacatcaagggtgccaacaagggatccgagaaaccgaaggactgggattgggagggcctgttcaaggcgctcaacaccgtgatccccaccaaggtcgacgaagacgaggtcaggaagatcgtcggcggcctcaagggtgcgaaggccgtcgaggccgtgcgcgacctgatcgtcgaggacgccaggcagcagtacggcgaaatggaggagaccatcggcgagaccggcttgcgtgatctcgaacgccgcgtggtgctcgccgtgctcgaccgcaagtggcgcgagcacctttacgagatggattacctcaaggacggcatcggcctgcgtggcatgggccagcgcgacccgctggtcgaataccagcgcgaaggctaccagatgtacaactccatgatcgaggccattaaggaggagaccgtccagctgctgttccacatcgacatcaagcaggtcgccaccaccgacgaggccgttgacgaggtcgaggagaccgccgaaagcgccgacaccatcgccgtggcctccggccccgacgagaacggcgaatccgtggtcgaggccgccgagggcgaagtcgaggaagaggacgaggatacggacgccaagcaggcgatcgccgaatccgcagccgcctccggggccggcgagtccacgctgcctgttgccggaccggctccgatcagccacgccgaaggcaaggtcccggtttccaagcgtccgaagagcgaagagctcaagacgccgtgggccgacggccgcaccttccctggcactggcaagaacgccccgtgcccgtgcggttccggccgcaagtacaagatgtgccacggccagaacgagaagtgacgcatcgctagttagtaactagctcatggctccccacacggggagccattttctatgcggttcatcagcatgtattcgtgcggtgccgtacgcgcgggacggcacgcgattttcgcggattttgacgtcgtatcccacactgttgcgggatggcacgagtgtcaatcgattgactagcgtggcgtcccgcagtacgaattacggaatcgttgaaattccgccattctcggtgttatggtgtcacggtccgcaaagggtgatgtgggacggcacggctcaaacggcgaaaatgagctgccgtcccgcagttttacgggatagcacaaaaaagaggcttctgctgttttcgtgggttgtcgggcgcgccgctcgtccaactgacgatgtggaacccgtcgggcgcgcgttcggcgttcgggcaccactcatgcacgcatgagtcgatccaccgggccccgtccccggcgacgaccctgatggaggcgcgctgttcgggcgtcaacgtttggaagaacaggccgaacacgtccctgccgtacccgtcgtgcgcccatatcgcccgatgccgttcgtggtcgacgaccacggtgatgcacgtgtggcctttgcggtagctggtctcgtccacgccgatcgacgtgaggccgccgaacggagacggcatcgacgctttcaaccgttcagcgaccctatgggcggcgtcttccggcggcgcgccacgcgacgtgcggaaaaccgcttacggtcttctggttcgcgacgctcatcggccacgcgcgttccgattcgaaatcgcgtgtggaccggctgcccggctcggcccacggcacggaagcgaccacgacgccgcacgccgccgccctggtcatgcccgcggcacctccttccgcatcgggagcatcggagcatacccgcacgtggacgcacccggatctcgagcacgggttcggaacgcggcggcgaatccgtgatccgcgcatcctctgcaaccgtgcctttgacgttcggcaatccggtgaatgggcttttgcccaggcgttcttcgtgattcatttctttggtcggaaaacagaatacgcgggaacgcccctcacgcttacgaaaccaacggctcgacgacgaaccgacatccacgaaaacagcaatagcgccatattttgcaatatggaagattcagggccttgaaatgacgaaccattacaatgagcggcgaacatacatcacacggcgtaggaaacgccaaggagggcatcatggccgagatcacatggaagtcgattctcaccaagctggtcgggggagaccaccttactgctgaggaatcggagtggttcgtggacgacctgatgcaaggtaacgccaatccggccgccgtgggtgccgcgctcgctatgcagcagcagctgggactgaccgccgacgaggtgcgtggtgccgccaaggccatggtctcccacgccgtgccgctgaacgtttccggtgggaccaccgacatcgtgggcaccggtggtgacggcttcgccaccgtgaacctgtccaccatgggctccgtggccgccgccgcagccggcgtgaagatcgtcaagcacggcaaccgcgctgcatcttcgaagtgcggtgccgccgatgtgctcgaagcccttggcctgccgctggatctgaagccggaagccgtcggcgaagtgggcgacgaggtgggcatcaccttcgcgttcgcccgcactttccacccggccatgcgtttcgtggggccgattcgcgccgcgctgggcatcccgtgcgtcttcaacatcctggggccgctgaccaaccccgccaacctagcacacgtggccatcggctgcgccaaccgcaaggtgagcccgattatggcagccgtgtacgccagccgtggacagtctggcttggtctacacctcccacgagggcatggacgaacttgcccccaccggcccggtttccgtctgggagattcgcgacggcaaggttaccgagtccgagttcgatccgactgtggatctgggcttggccaagattaccgtcgaacagctcaagggcggcgttccggacgtcaacgccaacgcattcaaggacttcctggccggcaaggacattccgtcccgcaccaccgcactgctcaacgccgcctccgccatcgtggccgacggcaatctggtcggcaacggcacactggccgagcgtttcgccgaagcctacaagctggccgaggaaaccgtcgattccggcaaggccgaagccctgttcgacaagtggatcgaaaccgccaagtccaaggcgtgatacaccgtactcagcctcctctgatgagggggggggcttatgtgtctatatggcgactgttatggcggccgtggccttgtgcgtgactgcgacgcgcggcacttcggttggtgccgctgatgtgccggttgtgccggccaaaggggacgtgacgatccgtctcaactggtggggaggcgacgcccgcatcaaggccatgattgccgagttacaggagtccatcgacttcaattcgtgacctatcttggctcggccgcaattacggacgagccacgcctgtgatacattggttcgctatctctcacacctcgcctacaaacagcccgctgggctgttcgcttaacggctcagcctcagagaggggagccaaggaccacacagcctacgcgagctacaccctcgcgccgtcgtcgtaatagccgccctgatcaccggggcggtctttgcggttgagaattttggccaccaatccacccaagcccaaaatgacgcccagcccgaagagaatattgagcagcgcgcctaagagaggaatcgcgttcaatccgggaacgaatatcatcaccgtttcgcctgcgagaccgatgatgagcaacgccgtcagcagtaccgtagacgctttgaccggaccaagatcagggttcgggggagtgaagccgccatcataggcgtccatcacattatcggtatccagccagctggagccggtgaaatcacggggacctgactgcttgccttttttgccgccacggctcgggcgagcatcatcggtgaacgagccgatatccaagtcatctacggaaagcagcgcctccttctcgcgtttcttggcctgcttctcgaactttttggcctgcctggaggaagccacgtcatgcaagtcggcctgatgctcggcttcgaacgcggcccacgccgcatccaaatcgttcgcgtcatgcgattgcggtgtatcggcaccattcgtggcttgtccggcggcaccgggagtcgacgacttggatgaagtaccggaatcctgtccgttgcccggcgtgggggttggccgctctccgtcggcattgctattctggttctcagtcataactgtcactctaatcaggcgaccggccaatggctagttcgtctgcgggaggaatgccaagtgctctactggttcttcgtcaaaggtctcggccctattgctcatcatcgtttgagccctgctgtcagcggactgaataacgtgccgcgagagggcggcgcgattatcgcagccaaccatctggcggtgatcgacgatgctttgattccgattacctgcccgcgcatggtgcacttcatgggcaaagccgaatacttcgagggcaagggattgaagggcaagttcaagaagtggtggttcacgtccgtgggcgtgttcccggttgatcgttccggtggcagcaagtcgcttggcgcactcaagcacgcacgcgagattatcgaggatgggcacctgttcggtatccacattgaaggcacgcgcagcccggacggtcgactgtacaagggacacaccggtgccgcacgacttgcgctcgagaccggttgcccgattgttccgaccgccatcatcggctcggacaagctgcagccgattggcacgtcgattcccaagaagggcaagaccaaggtgttgtatggcaagccgattgaagttgccaagaagccggccgatgagattacacatgatgatttgcgttcgctgaccgatcgtgtttccgccgcaatccagaaaatgagcggtcaggaattcgtgaacgaatacgcccagaaggtcaaggccgagctcaaggcccagcaggccgctgaagaagccgaaaagtaattaacaaatgaggctccctcgtctgaagacagagggagcctcattcaaatctcacacgatggtgagggtgatgacggtggggttgccgttggcgtcgcgcaggcgaatcttgccgccgttggagaggtccgtatcgccgcttttcacggtacgtaccgtgccgaacaggccaccgagcaccttgtcggttttcacctcgaacccgagaccttcaagtgtcttggttacggcgctttcctgtttgccgacaaggccggacggtatcgtcgccatctccggacccttggaaatcaccacgtccacgctatcgccccacttcagctgggctccggcttcctgagacgcggaaatgacttggccggcctcgaccttgtcatcgtactgttcggtgacattggccgtgagcttcaactcgccgagcgcggcttgcatctcatcctgggtcttaccgacgatgttaggcatggtcaccggcatcggtcccttgctcaaagtaaccgtcacctcatcgttgtgcttggccgtggtaccgggatcaggggagatcgtcaatgccacaccctgcggcgtgtccatcgaatactcatccttcgactcgtcgtgcttgacattatcgaagccggccttcttgagcgcgttcaacgggtccttgccattggccgaattcgcgtcgagaatatccttcgggatggtggtcatccgcacgcccttggacaccaccaccgtaagctcctgattggctcgcttgcttatgcggctgttcacaacggccttggtcttgttcacggaagaagagatgatcttgccttccgccacgtcgtcgctgtattccttgtgcgtcttgtaggggatgccgagagccttcaacgtgctctcatacgtggcccaatccgcgccggccaacgagcattcggtgcttgcattcgcatcgcaggtcacgtcatccggcttgggcacactccaatagctgcccggtccggcaaaccaccaccagccggcggttccgccgattgcagccagtaccagcacgatcaccagtacgatgatgagcggttttttgctgcgctgcttctttggcccggtgccgttggaagcgacgtccggctcatcggaaaaggcaagcgctcgggtgaaggcatcgccggcctgaggcagcacttgtgtctcgctgccggactgtgccatgatttgcgtcttatggggagccgaagcatcggctggcgtcgacgaatcaagtgccgtggtgggggcgaccggaggagccggaggattgacgtctgcggcgccaccggtatcgacggtattgcttgcgacatcatcggccaaaaacgctggtacggacggcttgaacgttgctgcaccggcaggtacgccggtcagcggggcctgctcggcgatattgcctaccagcgctgcagcggtggcatcggtatgatcacctccgatgggttcggcatgcaaacggtattgccacgcctccagcggcaatttggcggccaactggctcaattcctcagctgctgccgcgccatcggtggggcgggcatccacctgacgcgcggtcagatgggcgatgaacgccgccacggacggatcaatgccctgacagaccgtggccacggacggcacgtcctcatgaacatgcttgaaaacaagcgtcaccggattatccgaatcgaacggcaccttgccggtcagcatctcccatgccatgatgcccaccgaatacaggtcgccttgcgcggtggcctgattgttctcgatcatttcgggagccagataagcggcggtgcctaatagcatgccggtggagctcaatgtggcctggctggcggccttggccagaccgaaatcagtgatctgcacatggccgcgatcattgatcaaaatgttctcgggcttgatgtcacggtgaaccacgccggcgcgatgtgcggaagccagaccatccagcgtctccgcgaccacgcgcagcgtctcacgtacggagaatgtgccttgggcgttcatctcatgccgcagattgacgccatgcacatattccatgaccagaaaatcaagtccattgaactcgccggtgtcatacacctgaacgatgtgcgggttggcgatggacgcggccgaattggcctcgcggcggaaccgttcgacgaactgctcccgatgcgggcctttggcgagttgtgtgtgcatgaccttaatcgccacggtgcgccccagacgctcatcgatggcctcatacacggtggccataccaccctcggcgatattgcgcacgatgcggtagcgtccctcaatcatctgtgcgggctcgttctcactcatgttgtatcgtacggttcctttaatcacgactaaacatgttcagtgtacatggccccggttacgcggccggagcatcagcgcatagttttcacgggttttcaccggtgttcatggtctcatggtccggcggctcgcattgtggactatcgcaaggattcggggacgaatcgcgcacaagcctcggtcagacggcgttgcgcttcggaattcagctcaagaccggcaatcgccttacgggactcaccccatagggcagcgatgcgctcgcgggatcgatcaagagcaccggtcgacgtgaacagttcaatggtgcgggccacctggttgtcattgcgacaatcttcttcgaagatggcaatcagatcggccttatccgccgtatctgccgcagacagagcatcagccaacagcactgtgcgtttgccttctcggatgtctccgccaactggttttccggtattgcggcttgatccgacgacatccaacaggtcatccgccagttggaacgccagtccgagcggccggccgacggccaacgcgcaatgcctggcctgatccgggctctctcctgcggccagcagtgcaagcagcagtggagcgatggtggtgtaactggctgtcttccagcggaatacgttcaatgaggcgttcgccagagcttcgggattggacagtggggtcatctcgacggccaagtccagtacctggccgatttccacctcgcgttgcatggtaagaaacgcctcgttcagggcatcggtgttgggaagacggctggcggatcggcgtgtgatttcaatgcaggcggtggccagaatgtcgccgagcatcaggcccaagccacggcctatggcaccgctgtgtacggcctgttccaaggcatgatgtgcggaaggcttgccccggcgcagatcggattcgtcgatgatgtcgtcatgcaccagtgcggccgtctgaaacacttcaatggcgcaggccaggtcgatcatggcgtcacgccgatcaggcgtcacgtcgccggcaagaatatcgaaggcgtccaatgcgagcagcgcacgcagtcgtttgcctccttggctggaggaggcggcttggtccacaacctgttccatcaccggtttcagggcgtcggcaacctcgtcggtggcgggggcggcagtcagttcccgcaccaactgaatgatgcgtggctcgatgatttcgcggttgttagcagttgtgcacatgcctaataacttatccacagggtttgaagaacacaagaacgttgggaatcaagggttttgaagctagaaccacaatggtcgttttttcctgcgtcatacggcgttttcagccatagtgggcacacaccccctcggcgcatgagctatccggctcggcgcgcaccacaacaccaatagattgcacaccattagtcaaggaggacatgatgaacaacaacacgccgcacaagccgcgtaagagccgacacgccaaacggcacgccgccgagcagacggagccctttggctttgacgagttggagacgagatcacaggaatttcgcaataatcgacgacttcgaggcgcgcaacaggctaatgccgactgggtggccgaaccattggacgaatggctgtcttgtcttgatgccgggaacaccgacctaggccgagagacgatggccgcgtttgcggtgggcatgcgtgagaccttatcgattcgtgatgcgctgattctctcgttggttattgatgaaagccgttgccccaagtcatggcttatggaattcgcggcgcgaccgcatctggcgcgtacgagaacacgaatgggcgagctgctgacttgcgcattcgaggatgaaggcatgatgccggataaggagcgttgccatgccggcatcggtatgttgctcgatatcgccgaagcctcaccggtgccgtactgcatacagccattggccgtaatcgcctacaccttatggtggctgggcgatccgcgagcaatggtgttcgccttgcgatgcctgctgctcgatgaggattgttcgctggcggcgatgatattctcagccgccgatcgaggcgtggcaccggcatggtgctcgggctgagtgaacagaaacggcggatttccgaggttttacgcgcgatgcgcggaaggaaagcgtgtggtgatcggcaacacgtcgggcaacgatgtgggaataatcgtccgtggagggtggtttactcacatagttgacgatttgcccttgccagaagtgggcccatgtggtatatgcacttcacggcgagagatcaggaggagcagttttggccacgaaggaaacgacggcaaccaagcagacagccgagtccagcgaggagaccgagaccaagaagaaggccagctctacgaccaccgcacgcaagacttccgccaagaagtccaagtccgcagagccctcgaaaaagaccacgcgcaagtccgctgcgaagaaaaccgcgaagaaggccaaggacgatgagctcgtcaaagacgaggacactcaggtcgatgacgagcttgatgacgatgccgaggtcaacgacgacgatttggacgttgacgacctcgacgaggatcttgacgacgttgacgaagacgatgccgacgacgaagacctcgatgaggacgatgccgacgacgatgatgtggaagacgacgaggacgaggaagaagccaagtccaaggcacccgagcagcccaaggaaaagggtgcctacgtggtctccgacacggatgatgaggaagagaacatcatcccctcgggcaatccgaagcgtcgtgtgattgcggccggcgcaaccgccgacccggtcaaggactacctgaagcagatcggccgtgtgagcctgctgaatgccgagcaggaagtcgacctgtccgagcgcatcgaggccggcctgtacgcccagcacctgctcgacaccgaaagcgaaggcatggagttcaagcgcaagcgtgaactcaagtgggccgccgccgacggcaagaaggctaaggaccatctgctggaagccaacctacgacttgtggtctcgctcgccaagcgctacacgggtcgcggcatgctcttccttgatttgatccaggaaggcaaccttggtctgattcgtgccgtcgagaagttcgactggaagaagggcttcaagttctccacctacgccacgtggtggattcgtcaggccatcacccgtgccatggccgatcaggcccgcaccattcgcgtgcctgtgcacatggtcgaagtgattaacaagctgtcccgtgtacagcgccagatgctgcaggatctggggcgtgaacctacgccggacgagctggcccgcgagctggatatgccggttgagaaggtgcaggaagtgcagaagtacggccgcgagccgatttccctgcacaccccgcttggcgaggatggcgattccgagttcggtgacctcattgaggataccgacgccatcgctccgtccgacgccgtggccttctccctgttgcaggaacagttcaagcaggtgctggaaaccctgtctccgcgtgaggccggcgtcatcaagatgcgctatggcctggaagacggccagccgaagacgctggacgacatcggccgtgtgtatggcgtgacccgtgaacgcatccgtcagatcgagtccaagaccatgtccaagctgcgccacccgtcccgttcgcagaccctgcgcgacttcctggatcaatgatcatctggctcccctctgtgaggggagccaagcatttgaagagaaaaataggactgtatgcccaaagaagaatacggtgccaaggacctagctgttcttgagggcttggatgcggtacgcaagcgtccgggcatgtacatcggcaccaccgactcgcaggggcttatgcactgcctgtgggagatcatcgacaactccgtggacgaggccttggccggcttctgcaacgacattgtggtcaccctgcacaccgatggttccgtggaagtcgcggacaatggccgaggcatcccggtggacaaggaaccgaaaaccggcctgtccggcgtggaggtcgtgctgaccaaactgcatgccggtgccaagttcggcaactcgtcttataacgccgtcggtggcctgcacggcgtgggctcctccgtggtcaatgccctgagctcccgactggacgtcgaagtggatcgtgacggcaagacgcaccacatgaccttccaccaaggtcaccctggcgtatacacggatgccgacccggccaatccgtctcccgattccccgttcaagcgcactcgcaagaaccgacccaccgagctggaaatcatcggcaaggtatctcccaaaaccactggtacccgtattcgttactggtatgatccggagatcttcaacaaaaccgccgagttctcatacgaacagctcatcgaccgcgtgcgtcagaccagcttcctggtgcccggcctcaaaatcaccatcatcgacgaaaacgtaccggaaacggcggcgactgacaccgtcgaggccactgatgacacaacagtcgaacctgcgcaagaccaggcaccggccttggatgtctcgtccagcgatgccgaactcttcgacgactccgccgaatcccagtccgacgatgccgagagcccggccgaggaggacttctcgctgacggccggcgaccaggtcgtcgatggcgcgttcggcgaacagcccgcgcacccgcgcgtcgtggaattcctgcacacaggcggcgtcaaggacttcgtcgacttcctgtccaaaggcgagccgatctccgacatctggcgcatccaaggcgagggcacctataaggaggagacccaggccgtgggtgagggcggcgaactgcacgcccaggaaatcgaacgcacctgcggcgtggacatcgccctgcgatgggtcaacggctacgacaccacaatcatgagcttcgtgaacatcgtggagacgcccggcggcggtactcacgtggacggtttcatgaacgccatcaccaagcagattcgcaaggcggtggaagacaacgcccgcaagctcaaggtgaacatgaaggactccgccatgaaggtggagcgcgacgacatccaagccggactcgtggccgtggtcaccgcacgcgtggccgaacctcagttccaaggccagaccaaggatgtgctcggcaccgcgcaggtcaagccgatcgtcacccggctcaccgacaagcaattcggcgagatgatcaccggctccaagcgcgggtacaaggaacaatccggccgcgtgctggagaagatcgtcggcgaaatgcacgcacgcatccagtcgcgcaaggccaaggaggtcacgcgccgcaagaacgcgctcgaatccgcctcgatgccggccaaactctccgactgccagccgggcaatgacgacgtggccgaactgttcatcgtcgagggtgattccgcactcggtaccgccaaggccgcccgcaacgccggtttccaagcgctgctgccgattcgaggcaagattctgaacgtgcagaaggcgtcgatcacgcagatgctctccaacaaggagtgcgcggccatcatccaggtggtgggcgccggctccggccagagcttcgacatcgaacagtcgcgctaccacaagatcatcatgatgaccgatgccgatgtggacggtgctcatatccgtatcctgctgctgacgctgttctaccggtacatgcggccgcttatcgaacacggctacgtgtatgccgcagtgccgccgctgcaccgcatcgcgttgaccggctcgcacaagggcgaatatatctacacgtattccgatgacgagctggccggcaagctggccgacctcgacaagaagcacatcggatacaacgacgacatccagcgatacaagggtctgggcgagatggacgccgaccagttggcggacaccaccatggatccgcgcacgcgtatgctgcgccgcatccgcatggaggacgccgcccaggcatccgagatcttcagcctgctgatgggcgacgacgtgccgccgcgcaagcagttcatcgtcgacaacgccgacgatttcgaccgctccaagatcgatacctgatcgaagacgtcgctgataatgacatcgtgcttaccgagaatttccgtaattggcgtttgaggtgagcacgttgtcatatgttttatgcgtgttgcccatgagtcgttcgatagactgatgacatcgttatcacaaccggtgccgtactgtgaatgggagatggaacatggccagtctgttgcttgccgtcatctatgtggcgtttatcagtctggggttgccggattcgctactcgggtccgcatggcccaccatgagccaggatctgaacgtgccggtggcgtgggccggcggcatctccgcggtgatttccatgttcacgatcgtctcggcgctgctttcggaccgaatgacattgaaattcggggcaggcaaggtcaccgccgtttcggtggcgttgactgcggcggccttggccggtttctccgttacctcgaattactgggtgctgttggccatcgccataccatacggccttggcgcgggcggagtggatgcggcgctcaataactacgtagccattcactacgaaagccggcatatgagctggctgcactgcatgtggggcgtcggcgcatcggtcggcccctacatcatgggctatgcgctctctcaaggccaaggttggccgtggggctatcggtacatcgcgatcctgcaggtgatgctgaccgtcatcctggtgctgagcctgccactgtggaagaaacgtggcgcaattgcggtcggcgaatcgaccgatgacaccgcatcatctgacggcaatgccgagagatttggcactgctgaaggggtgtctgttgctgaacgcaaaccgctcggcgtggccggcgtgctcgccattcgcggtgccaaggaaatcctcgtgatgttcttctgctactgcgccgtcgaatccacggcgggcctgtgggcctccagctatatggtgatgcacagcggcatcgacaagatcaccgccgccagctgggccagcctattctacgtaggcatcaccgtgggtcgtgcgctttccggctttctgaccatgcgattcaaggacccggtcatgattcgcctcggccaagtgctggtgttcgccggcatcctcaccatgttcgtgccattgcctcaccaccttggcgtggtcgttgggctggtggtcatcggcttcgggtgcgcgccgatttatccgtgcgtcatccactcgacgccggcctacttcggcgaagacaaatcgcaggccatcgtcggcgtgcagatggcctgcgcctatgtgggctcactgctcatgccgccactgttcggcatcatcgcgcaatatgcgacaatcagtctctacccgtggtatttgctggtgctcttggtgctgatggtggccatgcacgagcgtcttcgcaagttgcgcggctgatcatatgcgcatttgggcccgtcgcctactatgcttggagcccatggtgataagtggagaagaacatgaacagatgcccgagcccgtacgggagcgattgagagcgctgaaggatgcgccgggctcggtaatcgtggtcggctcgatgaacgccgattacaccgtaaccactaaacgactacccaagccaggtgaaaccgtcaatggtggtgccatgaaagtgctgccgggcggcaagggcgcgaatcaggcatctgccgccgctcgtctcggtgtcaatgtccagttgctgggcgcggtgggcgaggactccaacgcggacttcctattaagcaagctggatgaggccggcgtcgacaccgccgatatcctgcatgtcgaaggccccagcggcaccacggtaatcaccgtgagcgctgagggcgagaacaccatcgtctattcgccgggttccaatgccaaggcaagtgccggctatgtgcaatcacatcgcacgaccatcgccgaatgcgcggtattgggactgtgtttggagagcccgattgccaccgttatcgccgccgcgcagaccgcgcatgacgctggcgtgaccgtgctgctcaacgactcgccatttatggacgagctgcctcacgaactggtggaagccacggatattctgctggtcaaccagcatgaagtggctcaactgctgggcctgccggatgatgacgtggaatcactcgactggtatgaggtcgccgaacgattcaccgattacggattcgaccgggcgatagtgacgcttggtgcgtcgggatcggtggtgatcgagaacggacgttggcatcgcgtatccgccgcgcaagtcaatgcagtggacaccaccggttgcggcgactcgttcatggggaccgtgctggctggcttggccgccggtcatacgctgctgcaatccgcgcaaatcggctcctacgtctccgcctatgcggccaccaagcttggtgcccaaagtgcctacggtaccgccgaagaagtcatcgcctacttcagctgacctataatcgtacatatgtacgaaagcctgagcctgttttccgaacccaccaagatgtggttcgagcatgccttcggtcagccgaccgaggcacaggctcaggcatggccggcaatccattccggtcgcaatgtcttggtcatcgcccctaccggttccggtaaaacattggccgcgtttctctcagccatcgaccgattgatgaccgtgccacgcacgcggcgtgccggtgtgcgtgtgctgtatatctcgccgttaaaggcgctcgcggccgatgtggccaagaacctagaacagcctttggagggcattgctgcacaatgcgaggcgcaagggctgcccgtgccgaagatcgcggtcgccactcgttcaggcgacaccaccgcacaggagcggcgacgcatagcctcccatccaccggatatcctcgttaccacgccagaatcgttgtatttgttgctcacttcgaaggcagggcggattctcggcactgtcgatacggtgatcgtcgatgagattcatgcagtggcgggcaccaagcgcggcgcacatttggcggtaagtctggaacggctggagaaccttgtcacagaatcgcgcaagcgagatgcaatcgatgcagatgctgatgagggcggtgatgccgccgtcgatgctggccgtggcgatcgtcatatgcagcgcattggtctatccgctacggtgaatccgcctgaaaaggcggcgcgattcctgggcggcgggcaaccggttaccatcgtgaatcccggtgggcggcctgcaatggatttgcgcatgattgagccgttggaaaacatgcgtgatttgcagtccgtgaatgccaagcagcgtgtcggtggcgtggatgctgaacggtccgctccgcatatcagtggtgtcacgccggccatgcagcgacttgctgaacgcaggggcattgtgccggtggatgatagagatgtttcttccacttctggggacgattctgatgcgagtgatgcgttcgattcctccgcgttggttggagcggcgggcgaccgtacctccggttccatttggcccgtggtggaacgcagtattttggatgagattctcgcgcaccgcactacattggtgttcgttaattcgcgtggtgtggctgagaaactcactgcgcgcttgaacgatctgtatgcgcagacccggcatggcaccaatcccgacactgtgcgggatctgggctctccggaaggccgcgaagggttctccacgcattacgatgctgtggtcggctccaccaccatgcttgtcggctcacatgagggcgatgatgtcatcgccatggctcatcatgggtcggtttccaaagaccgtcgcaaaatgattgaggaacggcttaaacgtggtgaattgcgttgcgtggtggccacctccagtttggagctcggcattgatatgggctcggtcgacttggtgattcaagtcgatacgccgttgtcggtctcctccggattgcagcgtgtaggccgtgccgatcatcaggtcggtggcgtctctcacgcattgttctacccgctcacccgtcagcagattgtcactggggccgcaagtctggaagccatgattgccggcgatatagaaccattggccgtgccgcgcaatccgctcgatattcttgcccagcagaccgtggccgctgccgcgatgcacgatttgaacgctgatgactggtatgccacagtgcgtcgtgctgcgccgtttgccgaactgccacgtgacatgttcgatgcggtaatcggcatgatgtccggcgaatacaacagcgaggaattctcggccttccggccgcgactggtatggaatcgggataatggcctgatttccgcccgtcccggttcgcagaaagtggccgttacctctggcggtacgattcccgatcgagggctgtacaccgtggtcctgcctgaggcggacgccggcaaaggccagcgtcgcgtcggcgagttggatgaggagatggtctacgaatcgcgcgtgggcgatgtcattacgctcggcacctccacatggcagattcaggaaatcacccgtgatcgtgtggtcgtgactccggctccgggccgcaccgcccgcctgccgttctggcacggtgaaggcgctggccgtgactacggtttcagccgtaccatagcccgcttcacccgagaaatcgccgccggattagacgtgaagcggactgaggggaggtctgccgcagaaggtccagctgtcccaaccttcatcccaacaatcctcacccgtctccaccacgatggcctagatgccaacgccatcaccaacttggcccgcctactctccgagcaacaagccgccactggtgcagtccccagcgaccaaacccttatcgtggagcgcacacgcgatgaagacggcggatggcgcatcgtgctgttaagccccttcggccgccgcgttcacgaaccgtggtccatggccatcagccgcagactgcgccaacgctacggtttcgacgggcaggtatatgccgccgatgacggtatcgtcattcagctaccggacggtgacggacatattcctgctcaagacctgttccttttcgacccagaagacctcaaagcagatgtagagcgtcaagtgggcgagtccgtgctatttgccgcacgattccgcgaatgcgccgcccgatcactgttcatgccgcgatccgacccgggccgtcgcgtgcccctatggcagcagcgactgcgcgccgcacagctcctgcaatccgcacgtatggccaagaactttccgctgctgctggaaaccgcgcgcgaatgtttgcaagacgtatacgacatgcccgccctgaacgaggtgatgaccggattgcaagccggcaccattaccgtgaaggacgtggaaaccgagtcgccatcgcctttcgccgagaacattctctttggcttcgtcggcgtggtgatgtaccagtatgaccaacctcaggccgagcgtagcgcgcaactgctgtctctcgatccgcacgtgctcgaacgcttgctcggcaccaccgatatggcacaagtgctcaacccggacgtgattcgcgaagtcgaacaggaactgggggagcacactttctggaatgagcttgccgacgatgatgtgactggtcgcgtgacccgttacgccaaaacccatggtcctttcaccgccgatcagctcatagccgatctacacctcgatgctacggatgccgtgcacactctggatgtgctggctgccaaaggcgagttgctgcaaggccactttgtagatgatgacgagcaaggccaacagtggctccataaggacgtattccgccgtattcggtctcgctcattggccaaggcgcgtaaagcagtcaagccagtagaatcagaggcgttccagatgtttcttatcgaccgacaaggtatcgggccggtcggcggcgaacgatatgaaggtgctgacgggctcatgcgcgttatcgagcagctggagggcatatcactgcccactgcactctgggagtcggcagtattccccgcacgagtacgagactaccaacctgcattgctggatgagttgctgaccagcggcgatgtggtctgggtcggctcaaaaaccgggggaaccagtgcgatggaccccggtgaggttgctttctatccggcggattcaatattgttcagcggtgtggaacatggtacgacatcgaacgcctcagacgccaccatgccggaagcgattctgaccgcactggactcagggggagcgttccatgcccgtcaactgatggatgccgccaaacgtgcgtggaatgagaccgcggagccggacatcaatccaaacaccggcgaaatcattccgcaagagtggagcgaacagcagttcaaggatgccttgtggagcttggtctggcaaggtaaggtcaccaattccagcttcgcgccggtgcgtgcattaaccgcaggcgcagcaagcccgcgtaaatccactacatcacgtcgtcgtgggcgtgtcgctccgattcgccgagccactacggatatgacgttaggaggtttgtggtccgccgtaatcgggcaagctgaagccgaagacaccgaccagaccgaacgggcactcgcactggtcgagacgttgctggacaggtatggcgtcatcgcgcagccggtgattgacaaggaaaatatcccgggtggctactcagcgttgtatccggtattgaatcgcatggaggagcatggtcgactggtacgaggcatgttcgtccgtggtttcggcgcggcccaatttgccgagcgcgacaccgtggatgcgttgcgtcatccgtcagagcatcgcggccagtccgtggtggcattgagtgtgctcgaccccgcaaatctcagtggctccgccatcgcgtggccggacgcgcctgccggtgcgggtaaaccggcacgccgtatcggagccacggtcgtgctcaatgcgcaaggcgcgctactatacgcggccgccaaagccaagcacctgacagcgttcgatcaatcggtcggccatgaagccgctgtcaatgattccgacgaacaaatgcgcaaggccgccacagaactggcctacgccctcaaacgcaatggcaccggctccgtgacattcagcgacatcaatggcgaacccctcaacgcccgtcaccccttcgcccgcatcctccaccagtccggcttcacccccgttccccaaggcatgcggctgtactgattgagcccagctatcgaatgcggtagttggagcctcgttgggtcatgatgaggccggcgcgggtgagcttcttatccagtgtgtagagggcgttcttgagtaagccctgttgctcgaagaatgggccgccgataagtttgaccaactcgctggtgttgacgaactggccatcagccttgaccagcgcttcaagcaaactgtattccagacgggacagtgagattgcgctgtgagtggatgcgtagtaggccttgtgattcgtggtgtccaacgtgagattgccacgaatgatcatggcgggggagtcggtggcaagcgagccgacgtatgagagcagttcgccatcggagaatggtttgctcagcgcggcatctgggcgtcgtacgttagcttgtgcgctagaggcagcattgtccgagcgttgttcggcttcggcatctgagttgtttgcgcgtgaattcgcgctgaaggagctgtagggcgtctcttcgataggggcgtactcgtcaggcagcgctcgccagcggctgccttcaccaatggttttgctgagtggcgtcgaagtcagcagcagaatcttgacggaggcacgggcattgcgtagggattcgatgagctgctcggtggaaatgccgagcagggattcatcaagaatcactgcgtcaaatgactccttggcgacagcggcgagcgcgatactaccggtgcttgccaaagacacctcatgacgaccggcaagcagggcaccatgaatggcgtgggccaacggttcattggatacggcaaccagtagtctcatcgccacctccttaatgcttagtgtaggccgggtttagggtctcttctctattgtttggctcactatcgttcgctcctcgcctacaaacaccccactggggtgtttgctttacggctcggcccatcagagggagcttaattgaggttacgcaatgaaggcgatgggggaggcgaggtctactccggaaccgtctcggcgcatatcgggcttgggaagctcgaccggagagcctgcggatgtagaggcgtgcaacgggtagaggcccacccaggcaagaatcagcgtgttctggcccttcaggaatcgctgggaacgcacgccgccggtagcgcgacccttggtggggtacatttccagcggagtgaccttcgccgcgccgttttcggtgccgggcagtgcatcggaatcgccggccacggtgagcaccactgcaccggatccggaagtcaagccgttctcgccctcttcataggtccatgccaccttgccggcgggaaccacgttgaaggccgccacacgggcgccctcggccagcttgatgccggccataccgcccgcagtacgaccctgcgggcgcacgttcttcgcctcaaaggtcagtagcgaggaatcggaggagatgaacaccagacggtcgtcatcctcggccacggcggcgaataccacttcgtcgccatctttcagatcaatgacgggccaagaatccatggtggtgggtgcctcacgattccaacgcttgatgacaccgttacgggtaccgatagccagcgacggcaacggcttggcctcggcggccccgccatcctcgctctcgtccttggcactggtcttgccggacgtcggctgctccatggcaatcgccgtaatcacacgctcaccgcgaatcggatcggtggattcggtcatgccgatcagttcgtcggcctgaactcctcccttcagcgacaatgtggcggcagcgggcaaggcaggcaaatcaaccacatgcgcgagcaccaggcggccggccgacgtgaccagcccatacgtagcgcgcgtggaagtctcgaagattgtggtgatctgatcgtctctcaaacgctcatcggaagtggatcgtgcattgaacacgtccatcgcgcttggcgtggtacgggcaatcaaaccggtagcgctcatcatcaccacgcacggctcgtcctcgatcttcaaggctccggtcagcgtggactgttcgccggtcttcttggccgcagctgcggctgcggccacatcggcttcggcggaggagatcgtagtggcggccttcaccgcttcgagcgcggacttggacacgcccgaagccccggcaccctgcgccacgaccggcgtcaacgtgccatccgggtcggcatccagcagcacggtacggcgcggcgagccccacttggcgaccgcttcgtccatctcgtcggtgaccacctggtcgagcgcttcggcggaggccaggatccgggtcagctcctcgatacgcttcttcagatcatcgcgttcggcctcaagctcgatacggttcatcttggtcagtcggcgcagacgcaggtcgaggatgtactgagcctggacctcgtccaaatcgaaaacgaccatcaaacggctcttcgcggcatccgcatcatccgaggtgcggattacctgaatcacctcgtcgatgtccaacatggccagcagcaggccctcgaccaggtgcaggcgctccagcgccttcttcttgcgatattcactgcggcggcgaatcaccacacggcggtggtccacccacacctgaagcatctccttcagacccatcgtgtgcgggcggccctccaccaacgccacgttgttcatggcgaagttgtcttgcaacggtgtgtgcttgaacaactgcaccagaaccgcatgcgggtcgaaaccagtcttgatctcgatgacgatacgcgtgccgttatgacgatcggtcagatcgaacgcgccggaaatcccctccagcttgcggttcttcacaccgtcggaaatacgttcgattaccttctccgggcccaccatgtacggcagctcggtgaccacgatggcctgcttgcgggccgtgacatgctcgatatgcgtggcggcgcgcgtggtgagcgtaccacggccagtggcataggcctcacggattccgtcgcggccgatgatcgtgccgccggtgggccagtcggggccgggcacgtagcgcatcagctgttccagggtggcgtccgaatgcgccatgaggaacttggcggcgtttaccacctcgcccagattgtgggtggccaggttcgtggccatgcccacggcgatgcccgagccgccgttgaccagcagattcgggatggcggccggcagcacggtcggttccttgagcttgttgtcatagttcggcgtgaagtcgacggtgtcctcatcgatatccgcgttcatgccgagagcggctgggccaagcctggcctcggtgtaacgggaggccgcagggccgtcatccagcgagccgaagttgccgtggccgtctaccagcggcagacgcatcgcgaacggctgtgccaaacgcaccatggcctcgtagatcgcggaatcaccgtgcgggtggagcttgcccatcacctcgcccaccacgcgggcggacttcatatatgggcggtcgggagtcaggttcatctcgcccatctggtagacgatgcggcgctgcaccggcttcaagccatcgcgcgcatcgggcagtgcgcgtgcgtaaatcaccgaatacgcatactcgaggaaggacttgctcatctcctcgttcagcggtgtctcgacgatatgctccttgaccgtgcgcggatcgtaggtttgcgcggacggtttgcggtgtgatgccatgaaactccctttcgaacgcccccatattagcgggagggcgcgaaacagtgcgcagagaacggttctcgataacaactgtgcgctggtttcggtgcgccaatcgcacatgtttgccgataaaacggcgtgattccagtgtttcagtcgatgtgcgtttgtttgattatgtgcgttggagcgcacagttgttattgagaaccgttctctgcgcactgagccaaggggaggggtgctacttgaatgggcaactatgagtgttgagacgccggatatggacgagttgctgcggctggtgcccacagtgggctatggggatgacgccccggccgatcggcgtgggggagcactgcacctgtccgccgtgctgcccgccttgtccgccgccatcggacatccggcccccaccaaggtccacgccgatcccaaggcatgccagcgcgcgttggggctgcccgatgccgaatcggccatcgtggtgctcgtggacggcctgggctactggaacctcgccatgcgcctcggccacgcgccctatctgcgttcgctgatgaacgaaagcgccaatcagcgtcccatcgctacctgcgctccaagcaccactgtggcggccatggccgcattcggtaccggaacctgcccgggactgaccgcaatggcgggctatacgcagctcgaacccgccagccataagctcatccaactcatccagttcaaagacgcgctggcacccaaaccagccaatccgcacattcctgtgccgcccatggtcgatccgctcgacctgcagcgcgaggagacggtgttcgagaaacttgcggctcaagaggtgcgcgtcacgagctcggggttgcccaagttctccaaatcgccattgaccgaagccgcattgcgaggcaccgactatcaaggcaacgtcaccccacgcgatcgtgtgctggccgccgcacgcgcctcccgcacccccggcctgacctacctgtacatccgtgacgccgacaaagtcggccacaattacgggtgggattccgaacactgggtggccgcattcgaacatatcgacgcccagctcgcgctcctgaaacgcagcgcacccaaaggcacactgatcgtcatcgtagccgaccacggcatggtgcaaaccgacatggaccagcggattgacatcgccgttgaaccgcagctcacccgaggcgtgtcactggtcgggggggagccgcgctcgctgatgctgtatgccgagccggatgaacgacctgaggatatagcttgccggtggcgcgattgtctgcaagaccgagccttggtgcggaccaaggatgaggccatcgcggacggattgtttggaccggtctgcgagcgagtccggccaatgctcggcgatgtggtcgtgcaggcagcgggagccgtgaccctcgtcgattcgcgtacgcaaggagacaaggccacccacctgccgagcgtgcatggctcccaaacagcattggaaatggatattccctgcctgatcgatatggcctgattcggaaattcagtctccgaacagaatctcgtcccagcttggtacggccgaacgtcctgatttacgcttggccggtttggctggtgcctcatgttcggtggcggcggattcggccgcccgctcctgctcggtggctactagctgtgcattggggccactccgtatggtcttgtccgaaacattgtcagagccctgctctggtgccgtggcaggcgattgctgtaatcctgcggcagatggcgaaacagatccggcggtctgcgaagagaccggactgggggccgtagtgccatgagcctgggtcgtggccggtgagatggacgtggatagatccactgggggcatggaacctgtggaagtgacagagggccggattgcggcaggccgtgcggccggaatcgaaggcgtaggagccgcccaagcagacacggcgcgctcgatacgcgcggagcgtacggagtcgccgggcagttcgggaatcgtcggcttgagtttggaatccgtggctgattccggattctgttcgccgagcagttttcgagcggcattgttcaggctcatcacggaattgtcgtgcatattccacgtccattcggcatggatctcacggcccgcggaagtgaatatcgccacgatgcgccaaggctcaagtccacgtcgggtggatttccaggtcactgattccatgccgattcccgcagaggccagcgtgcgttccaccagttcgctgatggtgcgcaccctgctgtctttgggtgccgccacggcaaggaactgttcgatggcatactgtttctcggtctccacagccatggagaaacgacgtaccagcatttcgctcagatgatatttctccgcgacacgggccggatcggcaccggcgcgaatcagcgactgtatctgggaaatcggcaaagtggactgctgatgcggctggggagcctgtcgcatctcgcttctgacctgcttggcctcaagaatcgcccgttcgagcgtgtcgtccacgctcacagccatttccctgccgccaagggagaatacgaggtcccccgtcttgctcacgcgcacgaaacgggctttttcaagccgatcatctggcatattcgcaccactttccgtcgcaaagacattacttcttttaagtatgccccacgtgtcgaactttacgagtatttcaaatcgtgtatcctatgggcgagtacggcgctgaccgtgctatatatatcgacttacgaaccaaagacgacgaaaggaccatgatggctcaggattatgattccccccgcaacaaggatgaggacgaggaatcgctgcaggcgctggggaagtcctcgcagaacgcctcgagcgacatcgacgacgatgagaacgccatcgccgaagactacgaactgccgggcgccgatttgagcaacgaggattcctcggtgaccgtcatccccatgcagggtgacgagttcatctgctcgcagtgcttcctggtcaagcatcgcagccagctcgcctacacggacgaggatggccagccggtgtgtgaggagtgcgccgcctgatggcgttcgacgagacctacaacgagcccgaatccaccgaggtcctggtcaagagcctcgaccccgaacatccggcccagctgcactatgcccacgcgggcgatgccggtgccgacctcatcaccaccgtcgatgtgacgctgaagccttttgaacgggcactggttcccaccggcgtggccatcgccctacctgcgggctacgtggcgttggtgcatccgcgttccgggctggccgccaagcagggcgtcaccgtgctcaacgcgcctggcaccgttgatgccggctaccgtggcgagatcaaggtgcctctgatcaacctcgatccgaagcacaccgccgtcttccatccgggcgatcgcatcgctcaattggtgattcagcggtatgttgaggctcggttcatcccggccgagacactgcccggatccgatcgcgccgaacgcgggttcggttcgacgggagtggcgtcctgaccggattaggccggttgaatgactaaggtgatgacggcaacaacggttgtggaaccaatgatggcgaacaggtgaatgcacaaggctccggttcgcggctacaatgaacttcatgacgagggaggtgactggcatggcagagattgatggcgagcagtacgccgcccgtaagttgggttgtgagatcagtgccgatccgctcaatccgctggatccaatcaagaaggtgtgcaagtcccatcaccccgatgaggatttgtccattcttgaccgtgcctaccggcgtgctgtcatccagcactccgcccagcgccgcaagtctggcgagccgtacatcatccacccgctggccgtttcccagattctcgcggatctgggcatgggcccgatcgtggtggcagccggcctgttgcacgacacggtggaagacaccgactatacgttggatcaatgccgcgccgaattcggcgacaccgtggccggtctggtcgatggcgttaccaagctgagtcagcttgaagtgggtgattccgcccaagccgaaaccattcgcaaactcgtggtggccatgagccgcgacgtgcgtaccttggtggtcaagctcgccgaccgcgtacacaacgctcgcacctggcgctatgtgaagaccacgtccgcccagaagaaggcgcgtgaaacccttgacgtgtacgcacctttggccaaccgactcggtatgaacgccatcaagacggagctcgaggaactgagcttcaaggtgctctacccgaagatctacaacgagatcgtggtgctggtggctcgccgagccggccagcgcgatgtgtacctgaagcagattctggcggagatcaacgaggatctcgacgagcagaacatcaaggcatacgtcaccggacgcccgaaggattacttctccatctaccagaagatgatcgtgcgcggccatgatttcgcgaacatctacgatttggtcggtgtgcgcatcatcgtcgacaccattcaggactgctatgcggcgcttggtgccgtgcatgcgcggtggaacccggttcccggccgattcaaggactacatcgccatgccgaagctcaatatgtaccagtcgctgcacaccacggtggtgggccccggtggcaagccggtcgaaatccagattcgcacttgggacatgcaccgccgcgccgaattcggcatcgccgcgcactggaaatacaaggaaaacggccaggccggccgcgccctgagctcgccggacaagtccgatcgaaagcgtgatgaaaacaatcaggagctttccgaggtcgataacctcaaatggattcagcagctcgccgactggaccagcgaaacccctgattccaacgaattcttgggctcgctcaaggaagaccttggctcgtccgaagtctacgtgttcacgccgaaaggcaaaatcgtatccctgcccgctcacgccacgccggtcgacttcgcgtacgccgtgcacaccgaagtgggtcaccgtacgatgggcgcgcgcgtcaacggtcgtttggtgccgctcgacaccacgctcgataatggcgataccgtcgaaattctgacgtccaaatccgatacagccggcccgtcacgcgattggctgagcttcgtcaagagtccgaaggcccgcaacaagattcgtcagtggttctccaaggagcgtcgtactgaagccatcgaggagggccgcgacgagctgacccgcgcgatgcgcaagcgcaatctgccggtcaacacattgcttacgcccgaagcactggtgggtgtggccgacgaccttaacttcccgaacgcggacgccgtgttcgccgccattggtgacggacaggtctccacgcagaacgtcatctcgcatctggtcaaggatgcgggtgccgacgaggtcgatgaggaagtcgagcaggaagtcctgccgctgaagcccatggaacgcaaggcctccagcagctccaccggcgtgtccgtcaagggcgtgggcgatgtgtggatcaagctggcccgttgctgcatgccggtgcccggtgacaatatcatcggcttcatcacccgtaatcagggcgtatccgtgcaccgcaccgactgccagaacatgatcgatctgaaaaacaagcagcctgagcgtgtggtcgaagtcgaatggaccagcaccaagggcctgttcatggtcaagattcaggtcgaggcgctggatcgacgaaacctgctttcggacgtgacacgtgtgctttccgaccatggcgtgaacatcatttccggtacgatcgccaccggttccgatcgcgtggccaccagccagttcagcttcgaaatggccgatccgcagcatctcaactcgttgctggcagccgtgcgcaagattgatggcgtgttcgacgtgtaccgcatcactggtgccaaggaatccgccgaacctcgactgcgcaagatgaagtagaccgttaccttactctggctccctctcagagaggggagccaagaacacgaaaaggtcctgactggaatacctgaactgcgccccgattgttggacgtggtttattaagggtacctgattaggctgtgagggacatgttccggaattcctccggggtgtgtccctccagtcgtatctggcggcgtttggtgttccagtggatgatgtacgcgtccagttcgttcttgaactgttcgtatgaggcgaactcgcgtccggcgtggaactcgtccttgaggtggccgaacacctgctcggtcgcggcgttgtcgatgcagttgccctttctgctcatggactggcggatgttcagtcccgcgagccggtcgcgccaccaccggtgccggtactgccagcccatgtcggagtgcaggatcgggtcggcgtcttcgggcagcttctcctcgagcatggcgagcaggcgccactgctgggccatgtcgggatgccggctgacgtcccaggccacgatctccttggatcccatatcgtatacgggagccggatacgccttgccgtcggcgaccctgaactcggtgacgtccgtgcccagcttcacccacggccggtcggccgtgaagtcgcggttcagcaggttctccaccctcgcgcccgtctcgccccggtacgagctgtatttccggtacgggttcggcctgcgtatccggcattccaggcccatgcgcctcatgaccttcagcacgctcttgtggctcacccgcaccccgaactcgtgcacgaggcacatgcgtatctgccggtggccgcacccgttgggcgtgcgcgcgaatatctcggcgaccatcggctcgatgtccggccgggtcacggcggccggatgcgacagaagatggtaatacgtgcttttcgccagtccggccgccctgagcaggtgccggagccgatgtcccagccccgccagcatggagacgatcaccgttctgtcccggttgccgatctccacgccagcagggcgtcgactttttccaggtacgcgaccctcgccttgaggtacgcgttctcctcctcaaggagctgttcccttgtgggagccggcctcggcttggatttcgcgcccctgggcctgcccttcggtttcggacgcagcgcgtccgggccgccggaccggtactcgcggcaccaacgctccaacggggcgggacccgcgatcctgtacttctccatgacttcggccttcgtcagcccatgctccacatggtcgcgcaccgccgcgagcttcgtctcgtagtcgtatctcctgttgccttcgcgttctcccatgagcgccgcctccccgccaaaccggtatgacaacacccattttcccgcggtactgacgggcacgccaagccggcgggcgagagaacgcctcccggccccgccccggatcaggtcggcgacgacccgcatgaaaccgtcatcgtaatgacgcctgcgatccctacacatgagaaaccgcacctccgatcatcgaatctgaattacttcagtccaacaatcggggtgcggttcagaatcaggaccttttcgtatatgttgtcggtcttactccgccacgtccacggacagaatcacggccggctcgagcgggcgatccatcggatcggtgtccagtgcttcgagcttatcgacgaccttcttggagtcgtcatcggcgacctcaccgaagatggtgtggtgaccgtccagccacggggtcggcacggtggtgatgaagaactgggagccgttggtgccatggaccttaccgtccatgccgcgacgcagaccggcgttggccatagccaacaggtacggcttgtcgaacttcaggctcgggtcgatctcatcgtcgaactcgtagccagggccgccggtaccggtgcccagcgggcaaccgccctgaatcatgaactgcttgatgatacggtggaaggtcaggccgttgtagaacttgccgtgggaaggctggccggtgtacgggtccgcccattccttctcgccggtggcgaggcccaggaagttggccacggtgttcggagccttgtcgtcgaacaggttgatggtgatgctgccctcagaggtattcataatgatggtagtcatacgttccatgttctcattgccccacgtcattgactggcattgccgccatcgctgctatcgagtcggcgattgtcagccaatgaatttgatgccggttccgctgctgctaccggttgaggagccgctcgaaccgctattaccggagtttgaactggatgatccgcccgtggagctggaagaggaaccggagccattggctgatcctgaacccgatccggttgaaccgttgccggtgccggtggtgcctccggtggtgccggaaccggtggaaccgccagtcgtgcccgaattagtggaggaatcggtgccggtcgaaccatcggtggatccattggtgttggaatcggttgaggagtcggtgccggttgagccggacgtgcttgaatcggtgccgtcgttggacgagccggatgtggagtccttggtgttggaatcattcgaaccgtcggtaatgcccggctgcggcagtccgttattctgattggacgtgtcggtctgcgttttggtgtcggtttgcgtgggcgtggtggacggagtgatgatatggtccgtgccacggccctgcgtgaccagcatgacgatgccggcggttactgccacggcgagcaggccggataccagcgtgacgataatggcggtgcgcttcgaattatgggagcgggccttgcgcagttcattgaccgaataggttcgtccgttcgctcgattggacacgacttcgcgcggcttgcgcgcggtggaaacggtattgaccatgccggtcatcgtcgtatcggactcggattcggctgccttatcggacttattatccgtagtgtcatcgtcattgccggaagacgaggccgactgtagtttctcaccggaggcggtgagtatgttttgatagattttggtggccaccgcggagacgatgtagctggctgccgcgccgattaccgagccggcgataccgattttcgatgccagtaagaatgaggtgacggcggcaagggtgcccgccacgatggatgagagggaaagaccttcgaaaaacttcttcacaagacacgaccgtaaagtgtcgggctggaaggttgcttaaggctcggtgataccgagaggatgcctacacgagaccttcaaaacctagccagcggaatgtggaatgactcaaaaatatggtgccgatgagcagtgggaatcagcgcaaagtggcgcaaagtagcgcaaagaacaaccgaaattggttcgcttggagcgaaaacgacgttcagcagaacgtcatgcagcccaagcgaagctgccgttgccggcacccaactcgaaatgcagtttggcgatgccaagtccgatttccgattgcacgccttcaagagcctcggccttcaccgtaacggttcagggcaatggagaacccatgaccatccatggccgaaactgaatcgtcagttccggtgcagcgactgtttggtcggcttgattaccgacatcagcacggcgacgaagatcagcgcaaagcccaccagtgaactccacatgattgtctcgccccagaacagcgcggagaacgtgacagcgaacagactttccgtacacatgatgattgacgcctgcgaggcaggcacgtgagccagaccgatgttctgcatgatctgggcactcatcgtggcgccgaggaacagatagagcacgctggccactactgagggtgccagccagctggcgttcggcatgggttcggtgaacaacgcgccgatgatgaacaatacgccggcaacgccgaactgcacaaaagtgacggcgatagggtcgaagcgtttggtgtagacaccaaggcaggtcagattgaacgagaagatgaccgcggtggcgatggtcagccagtcgccggcactcagcgacagcgaaccgcccggcttcagcgagacgaagccgacgccgatcagacagatcacgccggcgaccagattgatggccttcgggcggttttttgaaataatccacgtggcgaacggggtgagtacgcagtaggcggccgtcaggaacgcgctgcggcccggttcaatggtctgcaggccgatggtctgggtgaccatcgtgccccagtaggtcaggcccaccacgagcgccggcacaatgattttcggcgtcagatacggcacgatgtgcttatggaacaaggccagcatgcacaggcaggcgccgatcatgcgcagacccatcagccattggggcggaatcgcctccatggcgaatttggcgagcagatagctgccaccccataatgcagcgcagcccagcaacatgagtcgggcgagattcgggggaaagttgcgggaccagcggctgcgcagcttgctgaaacgttcgaccaaacccatggtgcacctcaggacagttaggaaaacttgtggctctctcggctcacagattacgggaactaccggccaaaatcgaccggtcgatgggtgtcgggtgtgtgacaggtgtgtggctggtgcgcgaccggggcatggcatcgccaagcaggcaaaaaccggatgaaagctgtgcgaaggtgaggttactcacagcgaacatccgggctagtcgcgttcgaaaccggtactctggaaagagtaaggatacgttatccgtagcaatcatgaaaggattcgacatggcagtcattactccggaaatcaaggaattcatcaagaacaacctcggctggatcaccaccgtctccaaggacggcgaactggatctcggcccgaagatgtccctgttcgtgctggacgacacgcacatcgcctaccacgagcgcaccgccggccagcactacgagaacctcaagaacggttccccgctggtcatcgctttcgccaacctcgagaagaagcagggctaccgcttccgcggcaacgtggtgctgcacgttgacgacgacatctacaacgagcaggtgaaggtcgccgaggaaaagggcaccaagaagccggccgtgattccggttctcgaagtcaccgagatccaggaccttgcctccggtccgaccgccggcaagaccatcgccaaggactgattagctgacgtattggtggcttcctcgtcagagggagccattttttcgctttttagtgcgcagtactaggtgacggccttgggcgtcggtggtggcgaagaggtaggtgttgccgccgtccttgagtttgagttttttgcgtagctgggccacggttagggggaaattgcgtacggcgatgttggcgtgcgtgaggccggccaatagttgcttcagttctttcttgttcatggtggcgatggattcgatggcgaatgacctgcctggaaaatcggcaataggttcggccgccacgaacaggtggctattcgggctgatgtgatgcacggcgaagcgctgttcgagaacatcaaagcatccggccttcatgattgaggcgttgggctcgtaaaggtacttccaatgcgaggaatcgaagtcgttcgcgctttcctcagacagggaatctttggtattgcaagtattgcgtgcagccaaggcagaatcgctgatagtggtgtgattgtcgctgttatcgccggccttgtacgacagcacctgctcgtcattagcacataccacgagcggtgaggcgtaacggccgcgccccaacaccagcaacaattccttgcactcattcccggtggagacgatatgcacctcatgtaccgcgccggcgaaatcggcgacggtcttatgccagtcgagcatgggggagagcttgaccatgaccgtcggtgccttggccagcagcatatccttcagggtcagcacatccggcatgcaatcggcaatcgcgtaggtacgcgagccatgatcgtcacggcgggccggatcgaggaagatcatggagactcggccaagcgtgtcaagcactgctgttgaatcatcattgatgacttcggcgtggtcaaggccgagtatcgggaaattatggcgagcgatatcacataaaatggattgttgttccacatatatggcacgattgaacactcgggacatgtaagaaaagtcgacgccgaaaccgccggtcagatcgactagggatgccggggagtcgtcgtcgactgcttcttcggccaacaatcgctgtgccagccgagccttgtactgtgcggtgaattggctggaacattgttccattgggacttgcggcgggaaaatcagcccatcatgggacgcccagtcaggtagcttgagtgaagcgcgctgccagccggcaatttgctccagcgcgaacggcacatccacgtcgccatcatgcttggcgtgcaaggccacatcacgcacatcttcacggcggtgtttggcgatgaacgcccaagtcgactcagaaatctccatgccgccattctaggggttgtgctgagatgagtatggcaaaccgcaagagaacgaggtgggaaaaccgatgatcgatgaagtgatgatgctgcgtcatggccgtacgcaatacaatctcgaacatcgcttgcaaggccagatcgatgtgccgctcgacatcgtaggccaatggcaggttgaccagaccggattcgcgctcgcttcacggtattactgggccaaggtgaaccgacttgccgagcatcccgaagccatcgcccagcccggtcctgacgccgccgaacgcactgatacgcgccagttcgaggaggctcccgccgccggccggcgcatggtggtgatgacctccgacctgttccgtgcccaacagaccgcacacgccttcgccgatattttgggattgccagtcacctgtgaccaacgactgcgtgaacgcagcttcggcgagtgggaaggcatgacccgcgccgaaatcaaagccgtggcagccgacgactacgcctcttggaaacagcacactgggggcgaaaccaagcatggtgtggaaagccgtgccgccgtgggccagcgaggtgccgatgccgtgcgcgcactggtcatcgactccgcctattcagacagcacgcccaccacgctgatgctcgtcacccatggctcatggattaccgccaccatctccaacctgctcgaactcgacccggacggcatgaacgcactcggcggcatgcgcaacgcctgttggtgccggctcaaagtgcgccacagcgtcaacggcacccccaccgaacagccactgtgggagttggaggaatacaacaaggctcccgccatcgccgacagcgccgactgggagaacgggccgaccgatctgcgaggaccgcacatgccaagttggcagccaatcgtctggtgatggtcgctatgcgaaaccccgctcgcaaattcgaacggtgggtctagactaatctcggtttggaaccgtacagcgatagaacagtaagaaagcgcggaaggcgggtgagacgacatgctgagaatcttcagctcaatcaatggccaagtggagcagatcgagaaaccggaaaacggctcctggttatgtttgagcgaacccactgatgtggagctcgccaccgtcgcctcgcaaaccggcatcgacctggccgacctgcgtgcccctttggatgacgaggaacgttcacgtgtagacgtcgaagacgattacacgatgatcatcgtcgacattcccaccgtggaagagcgtggcggacgcgactggtacgagaccatcccgctgtcgatcatcgtcaccgaaaacctcatcatcaccgtctgcatgcaggacacgcccgtgctccacccattcatggaaggcacgatccgaggcttcaacaccttcatgcgttcgcgcttcatcctgcagatcctgtaccgcaacgccacgatgtacctgcgttacctgcgcatcatcgaccgcgaaagcgacaagcttgaactgaagctgcgccactccatgcagaaccgcgagatcgtgatgctcatggagctgagcaagactttggtgtatttcaccacatcgctgaaatcgaacgaaatcgtgatggagaagctcaccaccctgcaacgcatcaagcaatacccggacgacgaggacctgctcgacgacgtcatcaccgaaaacaagcaggctatcgagatggccaacatttacagcggcgttcttgcgaacatgaccgacgctttcgcctcgatcgtgtccaacaacctgaacaacgtgatgcgcatcttcaccatcatctccatcacactgtccatcccgaccctgatcttctcgatgtacggcatgaacttcgatggcggcatgatgggtatgccgttcactgacaagccatggggtttcatgctcattatcgtgatttccatggtgctctccggtgcggttgcctggttcctcacacgttcgcgcatgttcaagtaaggcgtttgacggttatgcaccactggtcatcgttcgccagccgtagcatgctccgcgctcgccgtccgatgcggcgcggatttcgctcccgactgatggcaggattcgccgcggcctttggcgtgatattgccattatccggtctggccggttgcggccaaattcaagtcaccaccgtctccggagcgccggaggggcccaccatcgccattggggtcgcagccgacgagccatcggtgggagcatggcatgacggcacataccagggcttcgacatcaccatcgccaaatacgtggccgccaaactcggctatgcgaacaagcagatcgtcttcaaacaggttcgccccgaaaaccggcgctccatgctggacaatggacaggtcgacatggtcgtcgcctcttggcctatcaccgatgggtccagtgcgatcgttgattttgccggaccatacctcacgaccagcgtcggtttgctggtcaggtcggatgagcgtggccgattcaccaatgacgcaggttcggtgggtgacgtaggcgacggcacggtgtgcgcagtgaaaggtgacgagacagtcggcatcttccgcggcaaccacccgcaggcccggattcaggagcgcagcagttatgcgcagtgcgtcacggccgtgcaagtagggtcggcggatgccatagcctccgatatggcggtgctttccggtcttcaagcggccaacgggccccagtatatggacgtgattgcggacaagggcgaggtcggttatggcatcgccgtgagtcaaggcaccagccaattggcgcagaaaatcgcggaagcattggaagacatggttgaggatggcagctggacggccgccaaggatacgttcacaagccaaacaaagctcacggtttcgctgaacggcgaccccaaagccatcgtctcggatgctgaataacgattgacgacgtgtccagttgcgaggctaccttgctgatttatgagtgacaacgagaagagcacgcaaaccgaagagcccaacttccgctacaacgccgcactggcgcaggacatcgaaaacaagtggcagaagatttgggacgagcaaggcaccttctgggccgccaacgtcaacggcgatttgaaggacggcaagggccgtaacgccgaaggccgcaccgcctacttcgccatggacatgtttccctacccgtccggcaagggcctgcacgtcggccacccgctgggctacctggcctccgacgtggtgagccgctaccaccgcatgaagggcgagaacgtcctgcacgccatgggttacgacgccttcggcctgcctgccgaacagtacgcagtccagaccggccagcacccgcgcgtgaccactgaggcgaacatcgccaacatgagccgccagctgcaccgtatgggcctgagcttcgacaaccgtcgtacgttcgccaccatcgaccccggctacgtgcgctggacccaatggatcttctcgcgcatctacgattcctggtacgacgaggacgccaccaacccgtccggctccaagggctccgcacgcccgatcgccgagctcgtggccaagttcgaatccggcgaaaaggccattccgggccacgagtccgatggcaagcagtggtccgacctcactgacgccgagcagcaggatatcttgaacgacttccgcctggcctacatctccaagtccccggtcaactggtgcccgggtctgggcaccgtgctggccaacgaagaggtcaccgccgaaggtaagtccgagcgtggcaacttcccggtcttccagcgtgagctacgccagtggtccatgcgcatcaccaagtacggccaccgcctcatcgccgatcttgacggcatcaactggcctgagaaggtcaagctcatgcagcgcaactggatcggtgaatcccatggtgcctccgtgcacttcatcgtggccactgccgacggtgacaaggacatggaaatctacaccacccgtcccgacacgctgttcggcaccacgttcgccgtggtttccccggaacatcacctgctggagaacgtgcccgccgaatggccggccgatgtacccgaagactggaagggcggctatgccaacccggtcgaggcggtgaaggcctaccgtctggccgccgaagccaagaccgccaaggaccgcgtgaacgaggccggtgagaagaccggtctgttcaccggcctgtacgccaccaacccgatcaccggcgcgaagctcccgctgtttactgccgactacgtgctgatggactacggcaccggtgccattatggccgtgcctggtggcgaccagcgcgattacgactttgccgtgaagttcggtctgcctgtcatctacaccgtcacgcctctgccggattccggcgacgacttggccaactacgagggcaaggcgccgttcgtctcccatgacggcatcgtgatcaactcctccgtcgaggccaccgaagccaagggcgacgcgctgagccttaacggcctgcgcgtggacgacgccatcgccaaggtcaacgcctggctcgaatccgccggcgtgggcaagggcaccgtaagctaccgtctgcgcgactggctgttctcccgccagcgctactggggcgagcccttcccgatcgtctacggcgaagacggcaccccgcacctgctgccggattccgcattgccgatcaacctgcccgacgtgcccgactatgagccgcgcaccttcgatccgatggacgcagagtccaacccggaggcaccgttgagccgcaacgaggactgggtcaaggtcgagctcgacttgggcgacggcaagaagacctactaccgcgacaccaacaccatgccgaactgggccggctcctgctggtactacatgcgttacatcgacccgaccgacaccaagcacatggtggagaaggacgagttcgactactggatgggcccgaaccacaacaagtactcgggtgatgaaggcggtgtggacctgtacatcggcggcgtcgaacacgctgtgctccacctgctctactcccgcttctggcacaaggtgctcttcgacctcggctacgtggactcggccgaaccgttccacaagctgttcaaccagggcatgatccaggcctacgcctacaccgacgaccgcggccagtacgtgccggccgacgaggtcgtggaaggcccggccgacgcctccggcgagccgaccttcacctggaacggcgaacatgccaaccgcgagttcggcaagatgggcaagtccctcaagaacatcgtgaccccggactacatgtacgagaactacggtgccgacaccttccgcctgtacgaaatgagcatgggcccgctggacgagtctcgcccgtggaacacccgcaacgtggtcggtggcatgcgcttcctgcagcgtctgtggcgcaatgtggtcgatgagaccaccggccaggcccatgtgactgaggacacgccggacgaaaagaccctgaagctgctcaacaacacgattgccgaagtgaccgcggaaatggaaggcatgcgcccgaacaccgccatcgccaagctcatcgtgctcaacaaccacctgaccggtctgaaggctgtgccgcgtgccgccgtggagccgctgatcctgatgctcgcgccgattgccccgcacatctgcgaggagatgtggagcaagctcggtcacgccgaatccctgtccgccgagccgtggccggtggccgacgaacgctacgtgggccacgacaccgtgaccgccgtggtgcagatcaagggcaaggtgcgcgccaagctcgaagtgccggtcgacatcgatccggccgatctcgagaagcaggcgcttgccgccgtcgccgaccgtcttggcggcaaggagccgcgcaaggtgatcgtcaaggccccgaagatcgtctccatcgttcccgcggagtgacttgttgcgagccagctcccctctttgaggggagctggctcgcgtagcgagactgaggggagcgtcaaccgcccacctcaattgtggataacttcataagctagaaccacataccccgtttcagctggacaaacgcccatgaatccatcagcgtggatgcatgggcgtttctcataaccatcgcgcagaccatgccgccaaccgtttgcgcgcattcagcaggcagagcgcagtcatgccccaaccgcgagtggaacggcccacgacgcctccgccgcctcccggccatgcacggatccgtccggccggccacccgccccaaagggcgcagagcggcctgcggcaggcgactcgtgacaaacgtgcgttatcggatctgattggcgtacgttccgccgatgccgtcggcgaatcagccagactcacccgggatcagccgcgattgtcgttcaccattgggcatgccttggccgtgatattgctgctgatcgtcgcccttggcatcagcttggcattgctggtccaacagtcgatgaatatggccatgctgtctcaaccgaccgccatgcagaccacgggcggctccgctggagatcagacgatgccatcgcagaacaccacggacgagaaacgcacggatccgcagcagtcggagcattccgatgccacagcgaaccccgaatcggataccacgcaatctccgcacatgcagacggacggcagcgatgccggcgcttccacgcatggtctcatcaacctcaacacggctaccgctgaggaattgcaatccatcaaaggtattgggccggttaccgctcagcggatcattgatcatcgcacggcgattggcgggtatacatcagtcgatcagctgctggatgtcaaaggcatcggctccaagacgttggagaccatgcgagggcaggtgacggtcggatgagcagggattggatactgcgcgagcaggggagccgcgattggaggatgctgccgatcgccatagtgatgtgggcggcgagtctgggagcgcacgcattattcgcatggaggatgtctgatggactcggcactggtcaggcaaaggccgatgccggagctggcattgacgtcaccataatcggcatggaatggcctgtcacacgaatattgcctataacagtggcgtcatgtgctgccgtggcggcgatgatcgtggtgtctttccgcctgcggatccggtggacgggaacattgaccgtatgcgttgcggtggcgtgcatcggcagtatgacggcaatcgcgtcggacaccattgcctggcatgatcctgcctccgcacaagctcgccaatccagttcataccacgaagtcatggccacggtgacgacgcccgtgatcgcttcggaccaacgcacatacgattgtcagacggacatacggctgagcggcatcactgtggatggtacggatgtacgttccacggtcgctgtgcgtgtatacgccgacgaatcgtattgtgggcagttgcgtcgaggcgcggtccatctgctgacaggcgtattgcagcaagcgcgatatggacgcataccactatggctgctcttggaaggaaaacagccggtagcacaggtgcgggctccgccgtggcatctcgccgcgattgcgcatgtgcaggaggcgtttttcaccgtgaccgaacaattgtccgatcaggggcgtgtgttggtgccgggattgacgatgggtgtgcttggccaggattatatcggcggcgagaccggtccgatgccggtcaacagcacgtatgcgcaaacgttggagaatcagttccgccagtccggcatcatgcacctcatggccgtatccggtggccactttgtactggtggcgggattggtgcgccgattatgcatgtggatgctgcttgatcggcggctgacggcgttgctggtctctggagtatatgtgctgctggcattggcgatgttccccagtgattcggtcacccgcgcgttcatcatgggattgataggtgcgttgacgtatgcgatggggcggcgtacgcaagcgttgagcgccctgtgctggacggtaatcggtgtattggcggtgaatccggatatgtcggccagctacggattcgccttgtcttcggccgccgtactgggtatcgtgctgtttgcggagcggctggccggtgcctttgagcgagcgatgccgcacggcatcgccgaaatgatggcgatgaccgtggccgcgcagttgttcaccctgccgattcaggtgttgatggaaccggagttgccgttgctgtccgtgccggcgaacctgttggtgtcgccgtttgtgggattggccacgatggcgggattgatggcattggcctgcgcatggtgcgagccatggctggccggcgtattcgcgtggatatcgtcatggggcacgctggtgatggaacgggtggcgttgtggctgggtggcagcacgatggccgtcatcccatggaaagacggcgttacgggtgccgtgctgattgtggcggtggaaatcggtatcggcatgctactggtgttcgtcagccgttgcctccagcatgtccgtcgttatgaggccggaatgcctggcgtgcgcttcggttccgcttggcgtgtccgcctcagtctctggtgcgaggagacgagacgtctctttacgcggcggcaagccgaatagccaatgcggtattcggtgcagcaaccatcgcaatagccagccgaacctatgcgataggccgcgcggcataaaccatcagccggcaaaactgcgatacagttgagaccagttcaaccagctgcatgaaggagtgccggcgatgatgttgtctcataatccgatagtcgaaccattcgcattggcccacgccaccatcgtcaccggagataaagccggaaccatactgcgtaacatgacgatcgtggtcggagccgacggacgtatcgaacaggttgcacccagcatcgaaaccagtatcccagccgaataccactatcttgacggcaccggcaaaatcgtgatgccggggctgatcaatgcgcatacccatctgttctcccaaggcaagccgctcaatccgaagctggcgacgcccaaaggccaacgtatggtcgccacattcgcgcattcgccattgggcaagccgtacatggccgcaaccgtaaaacacaacgccacaacattgctggagtccggcgttacgacgatccgcacgcttggcgacgtgggatatgaagtcgtgacattacgcgatcagattgatgcaggccaaatcctcggaccgcgtatcttggcgtccggaccgctgatggcgattcccgaaggccatggcgccccgcttatcgcactgaccagcggcaccccggaagaggcgcgtaccgcagtcgcgcagaatctcaaggctggcgtcaacgccatcaaaatcgccgcgaccggcggcgtaaccgatgcacaggaaatcggcgaggccggcagcccgcagatgagcgtggaacagatgcgggcgatttgcgatgaggcgcatcagtatggtgttattgtcggcgcgcacgcgcaaagcccggaaggcgtgcggcgttcgctgctggccggcgtcgataccatcgaacacggtagcgtgctcgacgacgaattgatcggcatgttccggcacaatccgaatgcgttgcgcggatactcggcattgattccgacactgtccgccggcctgccattgaccttgcttggacaggacgtgaccggcatcaccgacatccaattggagaattccaagaatgtggtcggcggcatggtttcaggtgctcgtcaggcgcacgaggccggattgatgataggcgtcggcaccgatacaggcatgacattcgtgccgcagtacgccacatggcgtgagctggagctgctggtcgcatatgccggtttcagtccggctgaggccctgcacgcagccactgccgtcaacgcctccattctcggcgtcgatgccgagaccggttctttggaagtcggcaaatccgctgatttgcttgtgctgaatgccaatccgctggacgacctgcgcgcgttggaacacccggcattggtcatcgcggccggtcacccggtatggcgtcccggtcccaagcgtttcgcggatatcgacgccctgttggatgaggcatacgcctaatcgcggggtgctgccgggccgttatgccggcaggtcattgtccaacctgtgtggcgagatgggggcatggcgaaaacagcagcgaacgtaccggtaaccgtggtgcccggaggcgactcgtatttgaacgacgcgcgcaccaaggcactgtgcgcacaagcgttgaaggcgcgacccgacgccgaactcatcgagctcgacgccacatcggccgaccaatatgccttcgatgaagccgtcagcccatcgttgctttccgacgttgccgtggtcaaactcgtcaacctgcagaatgccgacgaaaagctcgccgaagctttggtgacgtacaccaagcaggccgccaaggatccgaacggctccagcgtggtgatctgccagcacgagggcggcgtcaaagggcgcaagatcatcgaccaactggtgaaagccggcgctcgcaaagaggacgtgccggatttgaagaaaccggatgcccaactcaatttcgtactcggagaattcgagaaacgcggtcgtagagtcgaaccgatggccgcgcagcagctggtatccgtgctcggcggcaaaaccggcgaactcgccgccatgtgcgagcaattgtgtttcgactttgacgataatccgatggggctcgactgtgtcaaccagtatttgaccgccaatccgcaggtcaccggttttgccgtggcagacaaggccgtggaaggcaaaaccgcagaagccatcgtcatgatgcgtgcagctgtggaacaagggaccgatcccatcgcgttgatcggcgcgttggccatgaagctccgtaccattgccaaagcctcggcggtccgggccggcacgatttcacaggccgaagcgaaaaccaatccgtgggtgctgaagaatgcgatgcgccaacttggcggctggacttcggcaggactcgcgcattgcatccgtatgctcgcctgggcggatgagcaaagcaaaacgaacggcggcgacccggtatatgcgctggaacgctgcattgaagacatcagtcataaaggtcggtaaaagtcgataaaggggtatttatgagcgaacacactattgcggctcccaccagcgaggccatgcaggagctcggccgccgcgtggccggaatggtacacggcggcgatgtattgctgctctcaggccctcttggtgccggcaaaaccacattcgcccaaggcttcggggcggggctggacattaccgaacccatcgtgtctcctacattcaccattgcccgcgaacttgacgggcatttcgccgacggcactccggctcatctggtgcatgtggatgcctaccgtctgggcggctcagcctatgcgccggggcaggacgccatcgggcgtttgttggacgagctggaatcgctgggattggacgaagaacttgaagaccccggcgagaacacggtggtgcttatggagtggggcgaacaaatggccaccgccttggctccagaacgacttgaaatccatatcgatcgacctctcgattcctccgatgtcgcatccgctggatcagacggcgaactcaccagcaacggcactcgtaccgtcgcattcgtcccagtcggcaagcgatgggccgcgttcgacctgcaataagccatgcgcccatagactcctcgatgtacactctctagaggctttacgactaggaggattcatgggttgcacgttggtgattgacacctcattcggttcgacggtcggcattgtggggcgcgagcccattgtggagaccgattcgcgcacccatgtggagaaactgcaggtcaatatcgcgcgcgcggtcgaggagaccggcctgactcctgccgatatcgaggagatcgtcgtgggcatcggcccggcgccattcaccggcctgcgcgccggcatcgtggccgccaaggcgttggccttcgccaccggggccaagctcgtcggacagaacgtactcgacccgcaaggcgagatgatgaacttcgtgctgggtgacagcgccatgttcgacggcatcgatttcctggccgacgtgccgcgcttgagttcgcgccaatcggatggtgacgtcccggacgccgaggccaaggaacacgaactcgaccgccacgtcacgctgtgcgtcaacgatgcgcgccgcaagcagctgtacttctcgctcaaccacggcagcatcagcctgccggacgaggacgccgccgaacgacgctggatcgagatggatatcgactacccggagcatatcgtcgaacgggtgaacgcggcgctcgcggaacacggcgaacgcgacggcgtcagctatgtggtggatgtgaccggccacggcgcggccaaatacgcatccgtctggcagggactgcgtgcgctgggctccgtggtggacggatcggtattggatgccgggaaagccgggctcgccgtctttgcgaccaccgcgttgagccgcgaactgcgcggcgaccaggtcgtgccgatcgaaccgttgtacctgcgccggccggacgccgaagtaccgaacccactgaagcacgtgctcggccatgccggtgccgataaggcgtgaagtgggttgtggtccgatgattgttgacatcactgccgtaagtcgtgatcttgcggttcgttccatcgcacagttggaaggcgaactgttcggccgcggcgcatggaatgcgaacatggtgcgagaggaactggacgcaccggcccgcacgtatctgctggatgtgctgggagaggcggaacaggctgttgtccgcggctacgccggcttctggtacgacggcgaggacgccgagctcatgaccatcggcgtgggcaaggcataccagcggcaaggcatcgccgctgcgttgcttcaggtactggtcgacgaggcgaaacgtcagggcgcctcgcgcatgctgctcgaagtgcgtgtggataacgaccctgcgctggccctgtatcagcggttcggattcgaacgcatgggattgcgcaaacgctactaccagcccgaaggcatcgacgcatacaccatgagcttggacctgaaacctagggtcgtgggctttgccgccccgcagacggcatcggcggacattgaagacatcaccagcaagcaaacggagaagaacggagaagcacgatgagcgaaccggttgtactgggtattgaatccacctgcgacgaaaccgcagccgccatcgtacgcggccgcgaactgctctccaacgtcgtggcctcatccatggaggaacacgcgcgatacggcggcgtgatccccgaaatcgcctcccgcgcgcacgccgaggccttcgtgccatgcgtgtccaaggcgctcgtcgacgcgaacatgacgttggcggatgtggacgccatcgccgtgtccgccggtcccggactggccggttgcctggccgtgggcgtgtccggcgccaaggcgctggcctgggctgcgaacaagccgatttacggcatcaaccatgtgatcgggcacatcgccgtcactcagctgcagttcggcccgttccccaaggacacgctggctctgatcgtctccggcggccacacctcgctgctgcacgtggaagacatgccgcgcaaaatcgatgtggtgggcaccacgctggatgacgcggcgggggagtgcttcgacaaggtcgcccgcctgctcggcttcccgtatccgggcggcccgcacatcgaccgccatggtcagaacggcgacccgcacgccatcaaggtgccgatgggtctgacccaaggcaaggccggtgccgcgcacccgtatgatttcagtttctccggtgtcaagaccgccgtggcccgttgggtggaaagcgagcaggccgccggccatgagattccggtggacgacgtgtgcgcatccctggccgattccgtggccaccgtgctggcccgtaaggccatgcgcggctgccggcagtacgattccaacacgctgatcgtgggcggcggcttctccgccaactcgcagctgcgcgccaaactgctcgaattcggcgagaactacggcgtcgacgtccgtatcccgcaaatcaagctctgcaccgacaacggtgccatggtcgccatgctcggcgtgaacctggtcgaagccggcgtggcccccagcgcccccgacttcccgattgactccgccatgcccctgaccaaggtctcgatgtaagatttgcgcggtattcccaaactgatactgggaataccgtgcctctcatcggtgaattgacagtgacctgtctgcctgatgtgagtagtggtgaggtcttcgccatggatttcccggttgatgatggggtgtcgtgtctggccaccaatacgatgaaaataaaaaagcctcggagaaccgaggctttcgatggctcctgcgactgggcttgaaccagtgaccgtccgattaacagtcggatgctctgccaactgagctacgcaggaatattcaattttcatcccggccggagttacccgttcaggtgagctcctgcgactgggcttgaaccagtgaccgtccgattaacagtcggatgctctgccaactgagctacgcaggaatattcaattttcatcccggccggagttacccgttcaggtgagctcctgcgactgggcttgaaccagtgaccgtccgatatacggttctggctcgcagccgtagggctttttgcaacaggagtagacaatacaccagccttgctgttccttcaaatcggcgtgtcatcgcgcatgttcgccttgcagctggttttccgaagagcatcggccagaaacgcgcaatagtattccttgggaagtgatgaagaagtcacttcccttttctatgcgcttaaggagccccatgaggtattggaacgacaacaggaagagctgcgaacacgtcgagccacgggaggattggaaagaatccattgagaaatggatcgactggatggacgccatcggacgcacgaacgacaccctgcgcacccgctggtaccagatcgttcgattctccaaagccgtcgataaaagcatcaccgacgtgaccgaagacgacctcatattctacctagccggcatgggaaccgaaggcagacgcggagtacgcagctgcgtcaaggtcttctaccaatggagcatgaagcgagggctcgcccgccgcaatccggcggacgaagtgcccaccgtgcccatgacccttccgtccggctgcatctgtcccgaggagaacatcgaacaaggactcgcatcacccgacgagaacgcgcggctggccgtcatgctgggcgcgttctgcggcctgcgccgcatcgaaatgaccagaatcaacctgaagaccgatctggaggagaacgccgagggcatggtgctccacgtccacggcaagggcaacaaggagcggatgcttcccgtgccggcaaagctcgcttcggcattgcggaaacgcaccggcgtatggctgttccccggagacgtgcagggacactgcggcgtcgattacgtggcgaagaggatcaagacggtaaccggatacccgtcgcacagcctgcgccgtaggttcgccacatgcgtctactacaggaacggctgcaacatcgtgcttgtcagccgtatgctggggcacgccaacatcgccaccaccatgcgttacatcggcctcgtgcaggacgaaatgcgcaacgccgtggaatccaccacccgcaccgacatgagactgaccatgcccatgaaccaggtcgtcggaacagccggcagcgtcgccacctattcccttagcaccgcgaggatcggatgaacaaacggtatacgccaacatgcttctttgcgcatattggcgtataccaacaccgctcaccgagtgttcccgagactggaaagcggcaacgcggctatgtctatccccagcgcatcggctgcggagaacaccgcttcaatcggggcttcgccccgctggagcagagcatcggcaaaccggggatcgataccggcctgggaggcaaggtcgtcggcgttccaggaatggttcgcggtctcttcacggaaggcggctgcgatatccgattcggtgcgggcgaaaagagtccggcgttcacgcggcgcttggaaacggctgaggtaacgcgcgtactccaattgcgcctttgtcggctcaggcaagttatagtccagattcgacatcgcagacctccttagcgttcagcgggttggactggagtcgttcgacgcaccgaaaatagggaatccgggaaccgcatcggccgacgatggagtgcctggagtgccgtacaacgtcccgatctgttcgatcgcccatgcgctccaacgtggggattcgaccgtggatgtcatcaggccggcggggaggaaccggcgcatctcgtcggcgaaggcatccgagccgatcacatcggcgacccccgccacgcgatcagcacggtctgcccaaagtccttcttcgccgtaatcagatgatttcaattccgcaagctccatcgcccgtcgggaatcgacgtcgcctctcgacgccaaccagcacatgtcccacaggtcgcgtcgccgcaggtgcgatgcgcaggcataggagagcagcttgtcggcaagaatctcggtggggctttccacatcgaggatgatctgacccgacaaggccgggaacatcggatagttgaccaaggcgggacgatgctgcggctcgtacgcgggaatcgatgccacctccagcttgattgtctggctcggcagatccttgcgctgaccggccgtgcgaatcgctatacgccatctgcgcgtcagcccatcggcgtcgggtctcggctccttgacccggaccgtcacatcatcgcccatccccgagagcgaatcggagatgcaggagccaagccctttaagggtgtccatgtcgaacgaggtgccgccggcaaaatcaaggtcctcgctgtaccttggggacccgtggcacaggcgcagactcgtgccgccctggaacaccagcgaggagaagaaaccctcgcgcatcatggcatccaggattcgataatgcagaagttccttctcgaccacgggaagcagattgcccatgccctcgcccccggccaagacgatcccggccgccatagccttgtagtcataggtgccgtcagctccagtcatcatcgtcctccaattcgtccatgtccaccagatcgaggttgcgtccgacggccttcaggtcacgatacgcccactgtttcgacgcgagcggcgtcagtccgtcatcgcgggcgatcaggttcggcaggatgcgactccagctgagcttgcagtgcgtgaactcgatcaccccgtacgcggtgcggaactcgccctcacggcccgtggtcatgaacgtgaccctatccaccggaatctggctgatcacgttccagcgcgacagagcgctttcgaggctttcccacaccagctcgccggaacgcaaccgctttgcgacctgatgaagtgtcccctcgccgagatgggaggaatacgcgaacacgtagacgccacgggcggcacggaccaacgccttcgccgataccaggctggacagggttcggttcagtttctgcccctgctcacccagcacgacggccagttcgttcttgcaatacacgtagcacgagtacttggcatccatctcgcgcagctgatcaatcgcctcgctcctcttcatgcatataagtgtacatgaatatatgtaaaaacgcatattcatgtacacctatcacaatcctgaagcgttccaatcagagggaacgccctcgtgccggaccgtcttcgagaccaatcccgtcgatggcgttttccgagaaagggttctctcttaatctgccgacgatttccgctacggcgtgctcttcctgatcaacgcattggacaagctgggaaatgaacggcttgggatcgccgtcaacctgccatgcttccagacttttcccatagctgcggccggcatcatgtttgattgctacgggccggtagccggcagccatgagcatgagattcagaatctgtcgcccggttcgtccgttgccgtccgtgaatggatggatgttctcgaacatcgcgtggaatccggcagctttgaggatcgggtggtctttggaaccgttcaccgcgtccacgagcgcttccatgtcctcgtagatttcaagtgggtcggcggtcttcactcgggtggcggtgatccttgcctggtagccgtaggggcggaaccgacccctgagcgcgggctgcatgtccaatgcggtgacttcatgcagcttttggatcatctcgacactcagcgtccgctcctcttcagcgaatcgttccgcataggccatgccatccgcaacgccacgggcagcgaagatgtatcttgccggcgagtcggtcggcacgaactcgccctccaacaccagttcggtgtcctcaagcgtcagcgtggatccctcgatcgcgttggagttgtagacatagcgggccatccattccttacggtaatcctcaagcgctgactgctccaccccatccaaaggaaacatctgcctgaaccgttctcgggcggcatcggaacgacgaagcaagtcggacacctccgcgtcccgctccagagagtccaagagaggaggaaggtttcggattttctcagtcagcgctggattcggcatatcggctccttaatcgatgcttccataagtctacaagcgcaggcgcgtcacatggacagtccgacgattttcttgccttcgagaaagtcctggaaaaaggccgtggaatcatcgttgtcgtccgatgattccatggcccttatccgtgtcgtttcttacgttcaccgggtcatgccgtatgacgatgactgttcgaggttcaacgggtcggccggatcgcatgcgccggcggaaagctcgtctttttcttgtttcgccggtgtcggttcgggcatcgcggcgagcttgtcgaacgtgttgaggaacgcgcctatctcgcggtcgctgctgatggggtccatgcccctggccttcgtcagggcgcgtatgaagtcgaggtgattgtccgcgaacgcgccgaaacgttcgaaatcaccgcccttgatgccggtcgtgtcctgctcgtacaggctcgtatattcgtcgcccatgcgttcggcgaagtccctcaccctggcatcgatgtcccattcgatgggcgggcatccgaacgcgagttccacgtaccggggttccacggacaggccccgatcggttttcaggtcgttccagaagcggtccacggattccttgccgccgtcgtagtggcggcctgcggcgtcgaacggttcgccagcccatgcctgttcgtaggattccaatgcctcgcatccctggtcggtgagctggcgtatctccacctccacactgccgtcgtggtggtggccgcgcatcttcaggattccgttctcgtcccagatgtggtcgatctcgcagtccttgaacggggaatcatcgccgttcatcagatcatcgaaggtctcgaacgaggatatgcccgtgcgttcgccgtcccatcggcctatgcttccgaacgcgatcagcgggttgcctcccatcgggttcctgtacgaggagagcgccgactgggatccattgaagaaatcacgcagagcgccggtctccatcctgtaatcggtttgacgggattcgtccgcgaaggcatcgaacgtgatcgacgtgccgctctcctcgtacagccgccacaggctgtcggcgcgggtgctgtgttcacggtaatacgggtccccgtattgcgggtcgtagtcgtcagcgttgtagatgtaccgtttgcggggttcgggatcccgaatctcgtcgatccaattcatgtccatcgtgtgctccttggttttgttcgtcgttgccgtacggcgtcagcggccgtgtgtcgtttccatgccgtcatccaacgcgaggccgagccctgcggtctcaggagacgtttcctgtgggtcggcccagccgacggcgaggtccagcgcgccgcgcaacgcctggccggaaagccggtacgtccaggaatcgtttgcctcgtaagggaaggattcgccggacacgatgccgcgctcgtcatgcaggctcacgtcgaacgttccgggtttggccgtgattagcgcatgacgggcggaaccgggagccgagacctccagcgcctttctgccgtcgggagacccggtggcggtgaatttgatatcggggtggtgcgcgaggctgtaggaagcgttggactcacacgccagcgggaccgtatctcccagcccgctgtctgcggccagctgctgtgggctgtaatccatgccctgcgtgtagtcgatgggctgcgcgtcggtgtagaagcatccgccgccatcgtccgcgtcgatcaggtcgcccacgagccggtccaggcgtgcggggtcgtcccatgcgctcacgagtctggcgggttcggcctggttcttccatgccatgtagcggtcgcgttggtcgccgcagatgccgtcgaatgattcctgggagatgaacgtgccgccgtccaattggtagcattccccgtccgggtccaacgcgcgctccttgaactccttttcggcggcggcgtacaggcgcttgtcgagcggttccatggccgcgtcgatgcccgccatcatctcgtccacgtgttgccgcatgtcgggctggctcgttttccaccatgcctgcaagtcggcgagcacgtcggcggcgttctcccgttcgcacacgtcgagcaggtcatcgtcgtaattttccaccgtccaggagtagaaatcccagtcactcgaaccggtcaggcgttcgatgcccttcatgcggtggaagtccatcaacccgccgccgtgctcgcgcacgatgcccgccaacggcagatcggcctcgtccatcaggcctttccagtattcggggacattcccgttctccatgtcgttctcctttccgaacgccttttcgatcacgagcgggtctcgtgggtcaacagtgcggtcgatccgcagtatctcgggcatgaccgcctcgctttcacggccgatgacgaacgtgccgataccggccttgacgcgatgctcgggaagccttcccgaaccgtcgcacatcaccgccggccggaacagcgaatccccgtaggcgagcgtcaccgtgtcgcccggcctggcgagaacccgttcgacggccatgcgtgagaggccgtgcgcgtcgagacggccggaacgccaatcgttggcctcggctgctgtcagggtgaaggaaacggaacgcccttcctgggccgaggtcacgtcgagcctgactggctgcatggcctcgaaaccgatccagatgccttccggcgtcctgtccggggctttcacgtcaatgtccgtgaacccgtattcggtcagcacgtccgtgaccctgatcctgagcgcgttgtcgggaggcagatcagggcgttcattgggaatcgggagcgaggacgcctcgaaccacacgtcctcgctcggatcggtgtcgaagccgccgtccgcgtcggaatacgccatgtggacgccgaactccaattccttggcatcgacggaagagaccagaatcgcgttccccagcacgagatcgcgcgcgttcctgcgcaggatggattgcatgtcgggcttggcgggattcccggccgcgagcaggtcgcggttcacaccctccatgtcaaaaggcgtcaaggccatctcgctcgccctttctcacttggaaaggccggaaccggccgtatcggtcatattcagcgggtccgaggggtcgcacgcctgcgcgcgttccgcgaacgaggtgacggcgccgggcagcacatatcccagatcaaggtcgatcgggctcacgccgtcgtcttcgccgacggacgctgcgggcattgcgcccatggtctcgcgcagcacgtccacggcgtcgccagtagcggcgcgcgcgtcgatgatccggtgcatcgtgtcctcaagcgcggcatggatatcggtggaaccctcctccacgatgcactggtatgagggggctccccagttcgtgccggtgccggaaatcgtgtagtccgcgatgcgttcgcccggctggacgagcgaggcgaggtcgaacgcggacggcgaaccggccttcgcgtcgaaatcatccagccattcgacctcctcggcgatctcctcgcgcgagtaccgtccgtcgatatcgctcggccagtccgcgtcctccagatagccgttgtcgccaagcgacacatcgccgtcgagcttgaggtcccggccgtacatctccatatcgatcagatagccgagccccgtatcgaacatggatcgcacggcatccgatgcccacccctggttcacggcggtccaggcatacttcgcctccttcgagtccggccataacggcgcatcataagagtgataggggatctcgtccgagttcaacgcgaggttcgcgtactgcaacggggtgcgcggggccgcgtcaagatcgtcgcggaccatccgcaccttctcgtacacgtccgggtcgtcgtcctcgcgcgcctcgaacgcgcggcacatgaggttcaggtccgtcagcgactcgtattcgacgggattcgccacggtggcgagcagtccttccccgccctcgtagtcgtggatcgcgtactcctcgtaccggccgcccaatcccacctcggtcttcagggtgtcctgcaagcgttcggcgggcatgggcagcgtgatccacgcgccctgcaacacgccctccacgtatttgcccaggttggcgacgtacacgctgatctggtagtccttcaatccgtccatgatgatgctccttcgctcgggtcttttatcgtgtggctgcggccgaggcagacgtatcggcaatgctcaacgggtcggccgggttcgcgggatcgtaggtttcggacgtttcggccttctcgccttcgtctttgcgggcgagccggccgtcgtccaccatcgcgtcgatgatctcccatccctcctcgatgctgcggtcccgcaattccctggccgagatcatgtcgcgcatcgcgtccatgttctcgttgttgtcgggccagtcatggtctttcagccagtgccgaaggtcctcctccgtccagcggatctccgcaatcgtttcgttgccttgcccggcgttgctttgaccgggatgaagcaacgcctcagatcggagaccgaaatacgctttgtcttcctggaggccggacaggaagccggagggcgtgaacccgttgcgtgccgcgaactcgcgggaccagcattcgtcgaactcctcgtcggggtcgaagtcgaggagcccgtccgccatggcgcgcctcagccccttctcgtccgtctcggccggcaccgtgaccgagaccgtggcgtggttgggggcctccagcgtcatgtacagttcgctgcggccggcgtagcgttggatgaagcattccccgttgccccagtcgagctcgtgctgctcgatcagctccttcgccttgtcggtcagggcccgttcctggggcgtgtattcattgggttccatcagcatgatgcgtccttccttcccttggatgatcggtgccgcgccgtccggcgggcatggctccgatcatcagcccatacgggcggtcgcgcggggcatggcgtctacgggtcagatgattccgccgagatttgatgctcggtccctttacgtgtcccgctccttagtaccagttgtgggcgagccagaacgtcttggcggcgctggggctgccgtaccggccggcgatgtagttcaatccccatttgatctgggtggcggcgttgtccttccagtcgtctcctgcggaggcgagtttcgacgcgggcaacgcctggggtatgccgtacgcgccgctgctcgggttggtggcattccactgccatcccgattccttgttccacagccatacgagcgcgtcatagtcgccgtctccccagtccttgtacgaggcgatcatcttccgggcgatggcccgggcctgttccggcgtggcgtgggtgccgtcgccgtcgtagtccaccaccacgtccgtggagcccgagtcggaactggagcacgtccatgccgcctccaccggatccgaagaggaggacgagtcggacgatgacgacgaatcggacgattcggaaccggatgacgtggaatccgtgccggcggaaccattggtggacacactgccgttgggcaggatgtagaccgcgccgacgttgatcctgtgcgtgcggtggttgacgatgcccaggccgccgcgcccgttcatctcgctgatggtcacggtgccggccgtccggtcgaccgcctcgacgacggcgacgtggccgtacagggtgtccgcgtcggccacgccgggcgggtagctgacgatgctgccggccacgggatcggtgcgggtggtcttccatccggcggcggtggcgctggcggcccagtcgccgccgttgccccagtaggagcccacgtccaatccgattttatggcctctcatgcacgcccaccatgtgcattgcccgtccggataggcctggcacacgttgtcgggcccgtcggatccgttgaaccacgccttggtctgcgcgatggtcatgccgtcacgcacctcgccggtcgtgacgcttcccgtgacgcctcccgacgatccgttggagccgccgtccttgcagccgccgaggaccgcgagcacggtcaacggcgtgcatccgccgagcagggacagcaggcacgccgagagcatggccgcgaggatccgatggcggctggcccggctcattgcgtgttcctcagcgaccagaagggcttctgcccgccgaccacgacctccacggtccggcagggatgctggaccgtgccgtatccggtggcggagatcaccgtgtacgcctcgtcgccggccttcacctgatcggggtcgagctcgttggcatccttgtccagcaatgacgcgtcgagcgcggccgggcagtagacggtgacgtgccagttgccgtcgtccatcggcaagagcacggtgttgtacgcctggctgacggtctgctgcggatccgtcgtggatgacggtccgccgccttccgggatcgggaagctggtttccttcgtcgtccagaacggctgggactggatggcatccgtatccgagccctcccatttgccgtcggaggtgcaggtgtaggcgtagttgacgtacttgtcatcgtattggcccgagcatacggatccggcgtggaagcggcgctgggtccaccaccagcgcggcgcgtcggagaccggatggctctccccggcaccgtcgtcgccgagcagcgcgaacacgttcttgcgccattcgtcgtcgctgccgtttggatcgagcagcgcgtccaccgtttccaatgcggtgtcgatcgggccggaaccattgtgcagcgtgatgccgtccgcgttttcggagagcgtgcgggtgccgtccttgtgggtgtcaacggggaacgcggtggtgcgctgagaccagtcgccgggaaccgggattcccgccgcctccaggccggcgtaccgtcgcgggcccgaatccgttttccttttgcccgtggactcctgtttcgcgtccgtcgcggaaccgtggtcgtcgccggccgttgacggctggtggttggcgacgatgacgcccagcgagcacacgaggagcgcggcgacgaacaggcacaggacgcgcagcggtttcggcagcggacgcggttccggccggttcacgattcaccgccttcccaacggttcggctcgcccggcatgccgccttgcgtgtttccttccatggccggatgctcccgctcggggttcacggttcccggatccgcgttttcgggcgacccgtcttccgccgacccgtcttccgtccccgtccaccgcgcgtctatgaggtcgtccgccgttttcagttcggcgctggtgtttcccgcgtccttcgccttcctgcgcagcagggtggccttctcgcgggcctcttccagacgtccctccaatgatttgatgttgacgcgcgccgccacgtactcgtccatcgcatcctgtttcgtcttctggctgtcgcgcaccgccttgaggatgctgcgtttcatgtcgcgcatggtgttctggttgttcgccacgacgatcttcctttcgctcgtttttccgtcaaggcgagtctgccttcccgtcgcgcgttccacggggcatggcgtctacattccccatggcggaaggcggggcgtgtagacgccatgccccgtggccggccgttttgcggccgagaatcggaagcgtcgttccaatcaggtgaaaggaaaatcaatggaatcgtttctctctatgctcgccggctggttcatgggcctgtggacgtggctggtcgagctcaacgggatgctccaggtggtgctcgtgctgttgtgcgtggtcgcctcgggcgtgtgcgcgatcatcggcaaacgcatgggcagcccgatgatcgtggaatccggcggacagacctggagccgcacgctggtgacggccatcgcgtggatcgccggcgtcatcctcatgctgatcgcggtgctggccatcgccgccgtgttcgcgccgctgctcggcttcgccgcctgaccttggcgacgcctttccatccagggccggccgggaagggattcccgcgccggtcctcgcatgtcggacaagaatcaaggaatcccaaaaaacggaaggaacgcgaacgaagaatgaagctcgtcatcgcggaaaagaaatcggtcgccacggccatcgcgcaggcgttgtgcgccgcgcccgtccaaagggacggatgctatgagtgcggccagctgctcgtgacatgggcgcagggccacctgatcgaccttgccatgcccgaggactacaaggacagggattggaggaaatggagtctggacacgctgcctgtggacccgtccggccattggcagtggaagatcagcgaggagcgcggtgccggctcccgctaccggcagatcgtgcggctgatccgccgaacggatgtggattgcctcgtcaacgcctgcgaccccgaccgcgagggtgaggccatcttccgccgcatcgcggacatggaaggctctcacaagccggaactgcgcctgtgggtggcgagcctggaggcggaggccatccaggccgcgtggcgggcgatgaaacccgaatccgaataccaagggctcgcatggtcggcggagatcaggtcgaaggcggactggctgatcggcatgaacgcgagccgcgcgtactcgctgctctacaacgcacggttcagcgtgggccgcgtgcagacgccgacgctcgccatgatcgcggaacgcgaccggcagatcaggaaccacaaaccggtgccgttctggaccgtgatcgcggacatgggcggatggcggctctccagcgaacggatcgacagcaaggatgcggcgatgctgctgtgcggccaggccgaacacggccgcttccgcatcatgtccgtgaaccggaggcgggtgaacgaccggccgccccgcctgtatgacctgaccggattgcagaaggacatgagccggttgcacggcatgaccgccgcacgcacgctccaggcgttgcagcacctctacgaactcaaactcgccacctatccgcgcaccgacagccggtacatcacgcatgacgacctcgaaacgctcacggcgctcctcgaatccggccgtctcgcccaagggttcgtcacccgcgagggcatacccggacacccgcgcccggaactcaccgtcaacgacaagaaggtggccggccacaccgcgatactgccgaccatgcaattggacgccgggaagctggaaggcctggacgatgacgagcgcaaggtgatgacacgcatcgtgcgccgcatgtgggaggccgtgggcgacgaccatgtgcacatcgtcaccgaggtgaaggcccggctttccgacgacaccgacagggagttctccagtcgttccgacgagaccgtatccgcaggatggaaggccgtcgaaaccggccacgggcccgaaccggaagacgaggaaaccgcgaacccggcgggaggaaggaacgtgatcccatcgaacctcatggaaggcggcgtcattcgcccggtcgggaaggtcacggtcgaggaaggcgagacccggccgcccaaaccgttcaccgaggccacgctgctggccgcgatggagcacgcgagccggtgcgtggaggacaaaaacctcaaggcggcactcgatgacgacgaatcacattccggcggcatcggcacacccgccacccgcgcggacaccatcgaaaagctcgtgcgctccaaactcgtggaacgcaagggccggcaattgcacgccaccacggaaggcgaacgcctcaccgacgtggtggagccacgactgaaggacgtgctgctcaccgcacggatggaacaggcgctctccgacgtggaacacggcaaacgaggcccgtctgaggtgatggacatgttccaccgggaggcattgcgaatccccgccgacgcgaccgcgaacctcaaggccgatgccgtcacacgaaccgcgaacaccgacgcgcaggaatggggcgactgcccgcgctgcggccagccggtgaggaaaaccggccggatgtggcagtgttccacgaacaagaccgagaagaccaaggacggcaagtgggccacgaccgcaggctgcggatggaagatgttcgcgcgcatcgcgggcaagaccatcaccgaccagaccgcgcgcaggctcctcgcgggacaatccgtcaccctgaagggcttcacatccaaatccgggaagaagttcgacgcggccatccgcatcgacaaggaacgcggcacggcgttcgacttcgaccgctgaccaaacgccaaccatccgtgcccgacgcaccatgccgcgccgggcacggcaacgaccaaggagacgatgaaaccatgcgacgatacagccacgccttccgggtcctcatggaccaggagctgttcaatctgcttgccgaggcctccaccaagacgggcatacccaaatcccgtttcgtgagatacgccatccagccgttcagctacacggaactcgcccccggcaccaccgattggaacgacgtgtaccgcaccgaccccgaccccgaacatccgctgaagcggggacgccagctcaatgtcatgctcaccggcgacgaatacgagatgctgtgccgggccgcattcaagctgggcatcgcgcgcagcgcctgggtgcgggaacgggtgtacgcgctcctctgccgctcctatgcggacgagctctccccgctcacggacgcgagcatccgcgacaacgcgacgatgctgctcaaggagctcaagacgaaggatacgggaagatgacattccaaaaaaaggaagagccccttcccattcgtggaagaaggcatcaccccgaacgatcatccaccctcatgcgttttcctatgcgctcatatggatatgtccatggatacccacatggacacgtccatagacatccacatggatatgtccatggacatccacatggagatgcccatcaaatcgaaggtaagcaagctagacggattgtatatacaatccgagcccgcagcctcccgcgccctgcggcgctggagcaacaacccgagtgccgaaggcctgataatcaatgatccatgagaggaggaaacgatggcaaggaaaagacggtgcaggcaaaacggtccacgcgaaaaggcggtgctgatccgcgtcgatgacgacgagaaacggatgctccaggatgccgcgctgcgacgcggccagaccgtctccctcaccgtcatcgaggcggtgaagctgttggagggaagcctgtacgtcgaggaggaggaacatgattcgcccaccgtccaggcgctcagggatatcgaataccagctgcgccgcatcggccgcaacgtcaaccagatcgcgcacaacgcgaacagggagatgaacgcgaccatcgaggacgaggcatcggcgtcctacgccgtccggcaatgccgggagctgatagaccatctcgatgccgtcatcgggcagtccgggggagtgcccgatgacgcgaaccggtcagaggagggtcaggctttgcggacggtccgcttgtagtccttggatttcttcgatgaaccgggagaacgtcatggtttctccctggatcaggtcgtcataggattccttgactaccttgggcatgaccaggtggatgtgcagttcatcgagttgggcgagcttgggatgggtcacgtcgccgggagtcagggtgaacaggtgtttgtccctgatccggttggcttcgtcggcgacctggcggaaacgatccttgatggaggttttcgaggcgagcatacgcagctgttcctcggggaacgccggatcctcgtaggcggcttgcgaggggaacaggaaatcgggtttctttccgttttccgtcttggcctgcgcctcgtattcgatgccgcgcgcgtcgaggatgtgggcgatgtggatttcgaggaccttgcctgcgcggctcatgcgccggttgcgcacggaggtgtagaacgaagtgaacgagtcaacgtcgatgacgccatccgatacgaatggcgcggcatcgtagtcgtgttggatgaccgcccgctcatagagtttgaacagcaggtagctgcggtcgtagtattcgatcaccacgtcgtcagggtcatcgtgcgtggggtccacgtccgtcaaggaggattgggagaaggccgcgaactcctcgttgctggggaacctgtatccccatctgccgatcatctcggggagatacgtgtcatcccgcacttcgacgttgatgccgagagcttcgaagatctgcgcgccgaaggcgtccagctcacgttccgtgttgtcgtggaagcggaacgcgacctcctgttcgtcgtcgatgccgaagagccatttggcttgggcttcggccgtgctgtcatgctgcgcgatgatgatcagcagacgattgtccctgagcataccgaagcacatgaggtcgccggggcgggccatgcggattggctcgcagtccttgtagtagagacgccattcggcgctgcggttcgggttgttgcgccgcgcgtcgtaccatgtggtttcgaggtcggcgaccgccggtgcgtcatcgtcgctcaggtacatgagcgcggtgggtatgccgtgcccttgtgaggctctacgatcctcgccggtgccgagcagtcttctgagcgcgtcgttgccgccgaactcgtgctggttgctgctgttggcgtcgatatcgacggccgacagtttcttggccgcgaccgggccgatgtagtcgccgattcttccgtaatcgctcataatccatgagcatagaccaatcggacaggaaacgcctcgggcgaatcagtcggacaggtagggtttcatcgcctcgcctatggctcggatgaccggcactgcgaccgagttgccgaactgccggtatgcctgcgtgtctgataccgggatactgaacgaatccgggtagcccatcagtcgcgcgcattcgcgcggggttagccttcgagggttctttccctcgccgcgtgagaccagtatctcgctgccgtcctttccgtaccgcgcgctcaacgtgcgcgtgtggtcggtggcggcatcgaccatgccatatccgaaaccgttgcctgcggcctcgtgcttcttcttgtagttctggaggtacgtccacagcttgtcgctcagaacatacttgtcgggaacctgggaggcgggcaggaggatgctgccgacgttgccgtgcgcgatgggcttcacgtcatcgaacgtgaacccgttctcctcgcgaaagcccacgatgtacgtgcgttccctgtgctgggggacgaagcccgccgcgtcgatcagcttgtaggtgacgtggtatccaaggtcttcggtcagcacggaatatatcgtcttgaacgtgcgcccacggtcgtgcgagagcaggttcttcacgttctccaggaggaacgccttcggctgcttcgccttgatgattctcgccacgtcgaagaacagtgtgccttgggtcttgtcctcgaagccggtgggacggcccatgctctgtttcttggagacgccggcgatggagaacggctggcacgggaatcccgcgagcagcaggtcgatgtcgggaacgtcatgctcgtcgaccttggtgatgtcgccggccacgggattctcgtcgtgccagttcgcctcataggtctgcacgctgtacttgttccactcggacgaatacaccacgtgcgcggcatcgcccagcgcctgcaccattcccatgcggatgccgccgatgccggcgaacaaatccgctatcctgatctcactcatacggttcctccgattcccgagaaacccaggatagcacatgagaagggcgcggcccgacaccccgcgaaatcatcgcgtaaataatcccgtggcgttcgggagcaaacttcccccggacgccacgaccgtcaccccagtaagccggaacctccatcgaggccgtcgaggggaacaccgggcacgatgcccatcccgttcacggcatcattcgtcttttccacgaccccagacgattgggccaaagtcagcccgccgggcacatggccgacggcgttctgtgagagccaatcggagagccgggagtagtcgcccgtctcgtagtagcgcaggagcatagagacgaactgcgccttgtcttcgggagggatcgagaagacgccgatgccgtcgtgtatgagctggtggttggcaaccatcagcgcggtgcgcttgttgccgtccgaaaaccattgtccccgcgtgaccgcgccgaacagcagcatcgcagtgtcctccccttctgactcctccaggatgccgcgaaccctttcctgtgaggactcgacggcggggatctccggcacccatcccgtgccgccgaccctcacgccgtattcacgcaagcggccggcgtcgcgcacgaggccttcgccgatgatgcggttgtattcgcggatgtactgccaatcgactggatagtcgatgttgtcgagcaggaacctccacgcgcgcttgatgttgttcaccgtgactatatcgtccacgctcatgccctcgggcgcgcgcccgtcgaagatctcctgcgtgtcggggaaggtgacgccatcaacctcgatcttggcggtgcgccagatcaaatcgaccagcagccgcttcgccagttccacggccgtgcgcctatccgtcgtcgtatcgttcctcaccggttccatcaaagccccttatccgtttccgataattctatcgaagtggccgtgccggcaaaggacgcatatctctcatagacgccatgcgccgccgtgccgggcgcgcgggcggagaatcatcgtatgataccgaatatcgtcaggggctcggacccggccggcctggtgcgctacctgttcggcaagggacggcgcaatgaacacaccgaccagcatctcgtgtgcgcgagcggcgacatgtttccctcgtttgacatggatggcaagccggcggcgtcgtatgcggagataggccgcaggttcgaccgacgctaccgcgtcagggaacgcaaggacgatccgttcccgcccgacatgcgaggcaagaacaaccccgaacgagagcatggcaggaagcgcgtgtggcactgctcgctcgccatcaaggccggccagggcatactgaccgaccaggaatgggaggccgtcatccgcgattatctgacgcgcatgaacatcatcgacggcggcgacgatcagggcgtcacatggctcgcggtccgccacggactgtccgccaacggcaacgaccacgtgcacatcatggtgcagctcgccgccgacgacgggtggataaacccgtaccacgaccggatcaacgcgcagaaatcatgcaggcggatggagaagacacgccccgaactggtcgagctcgcacgctccgacaccggcacgcgcgtcagctggcagtacgggcaatggcgtcaatgggccgaatggaaggcgcgaaacgagtacggcgacgacgagggatgggatgcgttggacggcaacgagagaagccggctcgtcacggcggtcgccgcctcaacgatgccgcgccagcatgtcggccggatcgtggaggcgtgcgccaaggcatcgcgcagcgaggacgagttcatacgccgcgtgcgcagggaaggcttctccatcgaccccaggctgcgcaggggaaccgccaaagactcgttcaccgaccccggccaggtggtcggctacaggatcacgtggcgcagcacggacgggtggacggaacggttcaacgccttcgagctcggcgacgacatgcgattgaaacgactgcgcgacgactgggcggacgatgccagaagccgcgccctggccgtgcaggaatggcgcgccgcgatggagaaccgcccgcccttcctcgatgatggacgcgaacggcacctggagaacctgtccacgcacgacatggaacgcctcgtatccgaagcgttctgcatcgccgccagcctcaacaacgcggcggacgacgacgaataccgggcagcgatgcgcgagggcctgcacacgttcgacatgctgcgcgaacgctacggaatcgcgccggaatacggtctatggagcatggtcgcctctgacgaggagaaccggccccgccgttaggacgcttcccggaaaaagctcagatggtacggcccgaggaaggaaaaccgagcgaatcgggcaaagccgatgctggatcgagagagttcgccggctcgtctcccggcatgatcggctcgatggactcgttcgccttcgtccagcacgcgttcaggcgatcggccatccgcgcgtccaggccctcgcaggattcggatatgccggcgaggaccttccccgccatacgccgggccatatccgccaccctcgaaccatcgagaccgtgacgtgtcgccagatcctcccaatcctggggcgtggtgtgctccgcgaaggcgtgatcctcgttcaacggcatggtgagttcccaattgaactcgggccaatacctggtggcgaccgcatcatactggggagacaggcgtatccccgatgcgggatcgaggatcagggaatagttcttcgcatgtgcgtcgctgttggcggacgacgtgttgaaggccagcctttcgagccaccggtaggacagggaacccgacgcatcgatgcgttgcaggagatccaggcagtcatcggccgacggatcgtatttgtcgcgggtcggcaatcccaacgcttgcaggaagtcctcttgccgcagtcggacgattcggccttcctccaggcgacggtcgaaccgttccacgatataggccgtcttgcgctgcgccgtgatctcgccgcgtgccggtgtgtcgatgccgcacagttccgacaatcgcatcgtcgccagttccaccttggtcgcctcgggaaggtcatggggcttcggtttgacgatgtgggtggagggcagcatcatatccggccaataccacttgccgtccacgcgggacagtgtgaacttgccctgcgcccctcccaaggagaaccggcagtggctgtcctcgtcccaccagtagttcctggtccgctcgatgcggtcgatttcgttggctatctgggaatcggagatcagacgaagcgtcggcgatgggattggaggttccggggagagggagaacaccagtccgccggtggcgtcaacccggtccagcagatcgaagacgccggccgaggaggcattcaggtgttcacgcatggcctggcggacgttcggattgtcgggcaatagattgtccaggaagttacgcggtgcctggtctctccatccgccggttctgggcaggctcagactgatcggcagaccctcgttcgcgtcgtacgcgaacgatatgcgctcctcgtcgtcttccgagaacacgcccacatgatgcccgttctcccaggcgtgcagttccctcacagcagtctccccgcgtaggcggacggcagcgtttcggtgcggatgtgcagcaggtcgaacatcctgtacacgtagcggatggaggtcagaccggtctccacgagctcttcggcgcttgagagggggaccccggctctcctggcgagttcggcggcgtcgagacccatgacggacatgcgttcgcgcacgcaacggcggaccgacgaggtgtcggggaagaaccgcgccgggtcctcctccttctcgtcgggaagacccttgtaggcggtcagggcatcatatttcgacagatccaacgtcacgtgtgccatgctcgtcctttccggttccgaaagccgttgacaccatgatacggccatccgatgccggcgcaccccacgaacctcatggcaaggggtgcgccggcgtcggcgtcagcgtgcgttgccgttggtctcgggttgcaggatctgcggcgtcgagacgttggcctggtcgggtatcggctggtccgtggggttcatggaggattccatggcggggctgtattcgccgaacgggtcgggcccgttccattcctcgggttcgttcaggtcgaggggcggttcctcgtattcgtcgggctccccggtcgtcaggtcgccgcctcccgtggtctcgggctcgggtccggatgccggtttgcgttcatcggcggcgggcttcgtatgctcccgcacgggtgtgggggtttcgacgattggcgcggcgtcagcgttctcggtgcgttcggcctcgcttatggtgctgggctcgtctcctgtggccttgttgtccgcgtgcgaggattccggcaggccctggtccttgaggaagctgattcgggaggcggcgtcgtccacgccgttgaccggcgcgcacatcacggcttcgacgatcctgtcgtggtcgtagcccgtccattggccggtgagccgcgagtccacgaagaacgtggcgtcgtcgccgtgcgcggcctggaacgcctgcgcgtcctccacccgttgcaggtccacgggcacgccggccgtgttgaaggcgttcagggtggcctgcaacgcgggcgactggtcggtgtaggtgatgttcacgtggttggtcaattggtcggctgcggcgtcgatgtgcgtttccgggtggcgtttcgaccattcgtccttcagccgggccttcgcctcgatgatctgcctgcggtagccggggtcgttgccctccagttggtcggcgaccatccatccttgcaagagggacgagtcgcgcatcttcctccagccgtcgccgtcggcaagcacggtcgcgttcagggtggactcgaaccccttgttgaggcgttccctgttgtccatctcccattgttcgaggcggatggattgctgctgccgtctggtctgctcgtagcgttcgttctggacggcgcgttcggcgcgttccctgcggcgcgcgcggtcgccgctcagctcgttgtgcagggtgcgcagctgctgggcgacgctgttccagctctggaccatgatctggtcgaagccgtcctcgggatcagtttgagccattgtttctcctccttgttggcgtgatggtggtttccttgttttccttgccgcctgcggcggggaccgacaacgtttccaggatcggttcgcgccatgcccggttcgggcgttcgcagggcagcggttcgcccttcctggtgagattctgcttgcagtcgaggctggcgacgatgccacggtccttgtcgaaaacgcggtcgagcatcgacgccgcctggatgtagaagatcatcatctggccgggtgccttgcgcgcgttctcgtaggcgcgccacatggcgtcgagcgggaacacgagcgccggatagcgccaccagtcgctcacccattgcatgttcacggatgcgctctggtggtagcagaacacgttggccacgaacctttccacgaacgcggcgaggttcggatagtaggtctcgctgcgccgcattcgcgcgccgaactggccggacacgtcccttgcccgcgcgggatcgaggtcgccggattcgtctcggccgagatccgtcttcccctcctgcgcgggcagtatacgggtgtcggattcctccgcatcatcctttggaggggtgtcgtcacggtccgttgcgtcttccggcgggttctcgtagccgttgccggtttccccggcatcggccggaatcccggatcggatgggttccgccgcgtgccggcctgccggcacctcgggtgcggtcggcgtcggctcgccttggcccggcatggtttcctcctcgatctccttgtcctcggggatgtgcggcgcttcggggttgggcagtcccttgccgtaaggcacgcccttctcctccaggatggcgcgggtgaacagttccagccatccgcagtccgatgacagcagggtcctggcggcaccgaccgcgcgctcccattcctccccatcagagccggacgtggtgttcgaggtgtgttcgctcattatgcggcctttctctgctcttctcgggctttcgccttggcctgcgccagggcgtcggcccattgcctgttgcccgtccatggcagggtcttgacgatctgcgcccgggattgggatgcgagcagcagcgcgcggccgacgggccattcggtcaggtcggaaacgtcgaggatgttctccttctggatcgagttgttcacgctgcgccggccgttgccgtcgatgttgacgctgcctcgcacgatctccctctggcccaccagctggctgatctcgccgaggaacttcgcgtccttgatgccgccaaggtagacggtgatgttcgcgttgttgaacagcgagccgaagttcgtctcgccgaacgcggccctgccctggtcggggttctgccagatcgtcatgatcgggatgcccgccgaaccgaaatacgagtacacgtccgccagttcgggccagcggcagatgttcgcggcctcgtccagcacgcagcacaacgggaccggcagacggcggttgttgccggtgaactcggattgggcgcgttggaacgcggtgaacgccaccaccgccgtcaggctcgcggtcaacgcggtcgagggccggccctgtgcggaaagcaggtacagggtgtcctcgctcgtggcgaactcgtaggggtcgaacaggccgcgccgctcgtcgatgttcccattcgtatcccggtgcgggtcgatccagtcgatgatctcggggtccgcgaggaacgcgaccatggtctgaaggctgccgaacacgccgcttcgggtttccggcgtcagcgcgatcacgctggacacacgcgaggcgatgcccgcgtagcgcgggtattcgctcaggatgtcggccggcgacgtgtcgcgctcgttggagcaccacctgaacacgtcggacacggaacggcctcccagatgcgcggcgaacaggtagtcggcgagctgctgggcggcggtgccggggaagaagtcgtcgccgccggtctgcggctggcccgaggcgtaacgccagcagtcggcgatgcgtttcgcgtcggcgatggactgcaccgaggcgatcaggtcccacacccacggcgcgctcttccggttcgggtccgcgatgcgttcggggtcgaacgtccatatttcgccgttcggatggtcgagcctgcggatcggggcggtcacgtcgaggatgtcgcccttgttcgaggtcgccaggcacgggcccggtgccgagagcacggccgggatcgcgtagcacagggatttgccggaacgtgggcccgccagaacgatagccatgtcctcccagctggtggacatcgacgtgttgtccacgatgttgagccccagcggatagcccggcgacatgcccttgcgccagtggtccgcttctatgagccttgacgccatggcctcggcgcgctggcgcgtcaccttctccacggcctcgccatggcccatggcaggcgcgtacacgtccacgcgggtgcgtgccttggcgccggttgcccacggcacggccttgctggcgatcagccacgcgcccacgccgcacgccacggccagtacgacgagcacggccacggccagcgcccactggcctgcggtcagcgaccattggccggagaccaggtacatgagcgcgaagatctggaagggatgccccgcatgggagcacacgagggcgaacgtcgtgaggatcaaggacaccgcgatgatgatcgccagttcgatcttgcggctgggacggaccgtgccgcccagatccttcactcggttcgattgcagtttcggatcgacgtcggccaagattcatttctcctttcaagcatgacggcggaaccgatggaagcggtcccgccgtcgatgcgccagggcttgcgtcatggctagcgggcgttgcccgtcgtgaaatcggatggggtggaaaggaaatccggtgccgcggggtccgccggagcgggagccgcgcccggtgtcggatagcccgacagcggttcgaagggctcgccgttgaaagtgcggggaacgccgtcgccaacgtattcgccgcgcgaggcgtcaacctggtccgtccatggatccgttcgcccggcatcggccacggcaccggcctgttccttgtcctggcgtttgcgttcgcgggcgagctggatgcgctgggacacgatggaatcgatctgcatggaatcgccgatcacgaccgggcgtgcgtatgccttgccgtccttctggctgatgaaggcgtcgggatcgcccatgcggccggtcgccaccacggcgtcgccctggcggaaatccatgccgtgcaggagctcggcagcctggccccagaatttcacggtggttctcaccgggccgagcggattgtccgtatagctgccgtccttctgacggactcgcgggcggtcctcatacacggtggcgcgcaggtacgccgagctcgtggtgccgtccgcgttggttttcgccggccagtaatcggggttcgcggcgaggagaccgcgaaccacttgcattgactgtggcatgatgatggtcctttcattcggggaataccagcgccttcaatggcggcggcgactcccatcatccggccggaccggtggcatcgcggggcacggcgtctacgtcagcgccccaaatgcccgccgttctcccacacgttcgccgcctccatggcgggatcggtttccggcagacggtcgagcacgcttgacgcgaaccggtccgaggcgtcgtagccgatggcctgttcggcgagttcccgcgccttctcgccgtcgcccatggcgaggctgagcatggccttcaggccgatgatccggtagcaggcgtccgtcggcgcgttggcctccaacgggccgaggatccccatcgccatgtcgatgcgcgccggatcgggcgtggtgccgttgtcgatcagccgggaaaacagcaggtcggtgttcaccatgccgtccggcgtattgatgcgttcgcgcaatgccggaagggataggggagcgttctcggccagtatgtcgctggcgatcatcatgcatgttgattcgggcgcgaactgcatcgtcacgcccaatacggcgagccggttcgcgtcggacgaccattcgcccgtggagcgtggttcggccatgagcttcgaccagtcgtaggcggcggcgttgcgccaggtggtgcgcacatgttccgagaatccgtcgtaggtcatgcctgagtccagatattcgtgtgtggctgcggtgatcagctcgtccaacggcggttcgtccgtatcggcggctgtggcctcgctctccacgatgaacgggatgcggggttcttcggaggccaggccgtccgtttcctccggctgctccccgttgatgcggtccgcttccatgcggtccacttcgccggcgaaccattcggagcccgcgaaataggtgccgtccatcgaggagagcaccggctggaggatggatgccagttcgtcgtacacggcatcggggttccgcaacgcctcgatggtttcagtcgccgcgttgtattcgatgatgcggttcgccagccgcatggcaccgtcatcgggtcgcacgtcgtcatacgattcgccccaatgctcgatccatccgatcatcgtctcccgtgtgatccgctcttcggcatcggtgttctccaaaggcatgttcggctccttgacaatcctcggcggcaacccgctgttcccgccatgaccccgatcatcagtccaaggccatggcggggtggggcatggcgtctacagggttcttacaggtttcgtcccgtgcggccggtcaggtcgtccacgaggccgaggagttccggttcgggccagatggagtcggcgaaaaggcagtcgtccgtcaggggccggtccttgaatatggttcgcgcgtcctcccggatcgaggccagcgagccgtcggcgatcatgccggtgaggtcctgtgtgcagtacaggtcgtatggcgtgaaccctttgccgttccaatcgatgtgatgggtgatcgaatactcgtattcgttccagtgctccatccatggaagggcgtggtcgccttcacgggtgacgaccgagtagcggaaccagccctcgggaacctgtatggcatcgccgtcatacgggtccgtcagggaatcgaggtagccggcgacgatggattcgccggcatggaattccgtgtaccatgcgaggtcgggattgcgcagcgcggcgtgcagcgagtcgagcagtgcggcgtcgttcatcgtggtcctttcaccggttttccgtttccggcaggatgccggtgttgtcgtatattctgaacgtttcgacggcgtgcgcgacccgcgccctcgattcgccataggtggcggaatcgaccgtctcacgccatacgggttcacgggtttccgcattgccgtacggcttgggctcggtgggggttatcgacatttcgaagtcccatgaggatgcgccgtgctcggcggggcggaagtcgagagtgctgcggttgcccgtcagccgcagcagccgggattgctcgccgagccggtcggagagggatgcggagcgtgccacggtgcggatcatgcgtttcatgccggtggcgaggtggtctgtcatcgcagggttcccttctaggcgtgccatttgaggttcgtatcgttgaacccgcttttttcgagcgggcacatctccacgttgatggggattccgggcagtcctcccagtttgatcaggaaacggcccagacccttgtgcgaggcgtcggagccgaagttgacgggcgtggcccaatcctccagcatgtcctcctcgcgccgggatacgggcagtccgcattcgccgcgcaggtagcggtccacctcgatgcggctcaaagcgcccagcaccttgatctcgctgcgttccacgaagccgcgagccttggtgttctgcgccggggtctccatgcacatcaggtccttgaacgtgtgtgtgatcatgatctggcctacgccccactgcctgttcagacgggtgagcaggtcgagtttttcgaccatgagggggctggcgcgcaaagcgcggtgcatctcgtccatgatgatcacgtggttgcgccggggctgtaatccctcctcggcgagcacgtcggcggcgttcttcgcggcgaacgcgctcgtccatgtggtcgccagcacggcggcgaccacgtcgtcgcccgactgggccagggcgctgatgtcgaagtccacgggcctggacaggtcgatgcgcgcggtggtctggtcgccgaacagacggccgaacttcgtcatgcggttcgagaatccgtgcaggtcggccagaaggccgcgaacctgcgccctgtagagctcgtcgttttccgggtcgtcccagaccgccgccgtgcgcacctcgtcgggtccttcgcgcagcaggtctcgcaggtccgcgatgacgggaggctgcgggtcgtcgccgtgccggtcgtggagcacgcgcacggccacggaaaggatatcggattcgcgtgcggtcacgcccctggcaccggcatcggtgtcgttctcgcggccggtgcgcatgatcgtcagcagcacctccatgagcgcggcgcgcgtgtcgttgtagtagtccgtgaggtccttgcgcgccttgccctccaagcgttgcagcgcataatggaggtcgccggggtccagggggttgaccacgccgatgcccgctcccagccggatgacctggccgccgagcatgttgaccagtgaggcgtagtcgggcttcagatcgccggggatgatcgcgttcatgcccagggcgctcagtcccagcacctcgcggcgcacgaacgtgctcttgccgatggccggcaggccgagcaggaacatagagggctgtttgatgatgccggccttgaaccagctgatcgggtcgcagcacacgccggcacccgtcatcaggcttcgcccgaccggcaccccctcggccggcagggccatgtcggtgccgaacggccagaatccgccgcacacctggttcgacgtgccgaagaactcgtctatcgtgggcatcagggccgcatagccgccttcacgcgagcgtttcccccgccacggcatcgggggcacgggctcgtccggtttggccttcaacggtgtgagcagcatggattccatgcgtgccacggggtccgtggccgtggcgcttggcatggttccttttcgtttcgacggcttccatggcatcggcatcacgtgtcctccgttcaggacaggagccggccgagggggccggctggagtgtatgatctgacgttcaatccaaggggcaggcttgcggcgaatcccgtgtcctgtgccccgtagcaggggcgcaggtcgatcttcgcgccgcctgcggcctgttccacggcgcgtgacgcggcttcgagtcgttggctttcctgttcgcccctggacacggtgacggtgacgagcatcccgaagaacaccatgaccgcgccctggttcgttgcgacggcctggcggttggccttgccgatctggctcatggacctcaccgtggcccgtttctcctggctgacctggttcgcggccttctgcctgttctgctcggccatgaacatggtcttgtcgggcggcagcatccggtagagcacggtcactcgcttgcggccgcagtccgccaacggggaaagcagccgggtgagcgtgtcggcggtcacgttgcttttcggcggatccaccatctcccatgtgcggctcaaaccggaatcatgcgcgtaatggctccacccggcctcgtgggagacgggtccgcaatcctcccaggcgatgtacggcggctcgtcggattcctcgatggtctcctgcgcggccggatcgtaggcgacgcggaccatgcgcgtgatctcctccatgcccagggccctcgcggcaccgcctcccgcctgcgctatctgctcgcggatcgagggcagcagcaggcttatgcgacgcgcggcctccccggcctccaggtatttgccgtcacggtcggtgtagcggaaagtcaaggtgagcgtcacgtcgttggaagcgccgccggctgcgtactggtccatgatctgcgccatggcgcgcgcggccagctcgggagcgtccctgacgatgcgtttgctcagcgtgcggcggaaacgcacgccggaatcgggtgccgtgtccacggtcacggccagttgggtgacgccggtctcggaggcgagcgattccatgagcccggcccacgaggccacgtacgagtcctccacgtcgtcgtcggcgaggctcgcgccctgcggctggcatgacaggagcagcgagtattcgccggtgtgcgcgtgccgcaccaggcagaactcgccgcccagcccgtccagggcggaggtcaggcccacccgtgagaggatgcccggcagcatggccttgccgccgtcgatcggcgcgagcaggccggaacgatacaggttagcgccggaacgctgcgcggccatccacgtgcgcttctccacggtgcgatccaccatgttgcggtgctcgcggtcgcggatggccaacacgaggatgacgcccatgccgaccacgaggatcgcgatggccgcgaccacgctcgccatgctgaccagcagcgtgcaggtcagcacacccatgcccgctatcgtcagcgggatgccgatgttgcggatgcctcccggcatcggccgcatccaatcgccgtatgtcgtgttcgacgccatggttatccgaatctccttaacaaaacgtatgcgtcagaatgtcttgcccttgcgagtggtcgagcggtcggcaccgtccggggcaccctcgcgggcgaacccgccggcatcgccgttcgccccctgcggcctgttgccgcctgacgggtcgggtggcgcgccatcgggtgccggtggaaccgggcttcccgtgccattgccgttcgttccctgtggtttgccgtcgctgcccttgcggttcgctccctgtggctggtcgccggtgttctgcggttcgccgcccgtgggattgccgtccagcggtttggcgtgcttgccgccgccgttcgctccctgcggctttccgccgtttcggccgagcccggaaagcagtccggccaggccgcggccggcaccgggtttggcaccgtccggtgacgcttcgccgcgtccgtcgccgccgcctttcctgccgcccttgccgcccatggccttgcgcaggccgccgccggccagggcgactcccatgccgagtatggagggcaggattccgccgccgccaccgccgaccgaggattgcacggcgggcacgatcacgcggatcatggcgggaaggaggatgatgacgctcagggtgagcatcagcgtgatggcctggctgtcgtcgccgggcccggccgtggccatgatcgcgctgccggtagccatgaccagtgcggcgacgggcttgtaggccaggaacgcggccagccagccgatggtcttggcgaaagcctgcttgccggtctccatccagctcatggcggcccacatgggtgccacgcccaccaggatcggcagcatcccggcgcggaagtaggcgaatatcttgctgatcagcccgcagatccacatcacgatggtgagcacgatggcgacgggcgcgccgagattgaagaacgagctcgcggccaggcttttcgattcccaggcgtcgttcatcatgcccgaggcggacctgagcacgtcggcggtccacgtgtcgaatgtggcctggaacgtgttgaccagtccggcaaggcacacggcgctcaggatcgcccacatgaaggccttgcccaaggggatcaggtcacgtccctcctgttgggtgacgagcttccagccggccgcgatcacgccgcacacggccgcgatgataaggaacgggtcaacctgcatacggatgtagtccgacaggaagaacgtggtgccgccgcccggcgtccatgacggcaggcccggattgccgccggacgagcgggagaagaacgtgagcgcgatgctcgcgcacgaggagccgagcagcacgccgagcagtatccagccgatgcggtcgagcagacggccctcgccgccctggccgatgttccacacgatgcgcgcgctcagcacgatcaggctgatcgcggcggctgcgacgagcacgccctgcgcgatgcgcaggtaccggttcaccggtgcgaaccacgaatcgtagtccggggtggcgttcgcctgcaacgttgataccgtgtcgttcgcggcgaccagcgtgttgcggctggtggacagccattcgatcgtggaatccgactgcacctggtacatgttccacagggtcttctccagccaggagagcttgcgctgcttccggcacgaggagtccttgtactcccatttgccctcgtcggacgactcctcctgatacgtgttctccaatgccctgcattgcagttccggagacttcctcagcagatccttcgccgcctgcttggtgccgaccgcgaccgcgccggtatgggcgggcgggtcgccgtactggtcgatgacccattggatctggctggggccgatcaggtcgccgagtctgccttcgggtatcttcatcacgtaggtggtctgggtgtcgctgatctgcttgtcgccgaactccagttccttgctgaacgagccgaagtcgggtccgccgcaggcggcgaggcccatgaggcaggcgagggcgagcggcagcgcgcacaggcgctgccgtatgcgtcgaatccctttcatggctttttctcagcagcttgcggtgacggacaggccgagtgcggcgaggatggcgacagcgcccgcaccgaggaagatgccgatcacccagttgacgagcttgtcgaaggtgtcgtcgcggtctggcacgccgtcgccctgctggcgcaggatgtgcacgccgatgcgcaccagcgcgaccacgccgatcaccaggctcagcgccttcacccagcccagggcggtggataccgggcccgagaatcccggaggcaggcacggggtcgggtcggaaagggtctcggcgaggatcacgtatgtttcatgcagcattgggttgttcctttcgtgttaggttcatgcaccatcgtcagccgacatgggccgtggcgcggggcatggcgtctacgtccttcacgagccgtgagtacgcggccggataacgccggggaaacccgtcgagttcaagccctttgatatggggcagccgccacacgcggacggcggatgacagttggatgcgcgccgccaccaaaggccggggcatacggggcacggggtcggtgatggccgcgcccaacaggatcgatgcgccgaacagtccggccgactggtcggcgagcagcgcgcgcaacgattcgagacctctcccggttcccatggcgcacaggatgatgcgcgagggcatggagggatcctggctcaccggcagcgcgcggccggcgtcggcgaaccggtcggggtccgaatggcggatcgtggtgcatccggcaccgccgtgcgcgcccaccagccacacgcggtcggtgacgggtgccgcgaacgacgggatcaacgtggtcagttgtggcatggtgttggtcctttcataggctcgggtcggtgccgggcagttgcgaggggtccgggttcgcgggcaccgaccagcccggagacgcggaaccaccggtcgagccggcggaaccgccggaggaatggtatccgccgccggacgggccggaacccgggcccgaagcggtgccggagggcgtgtacgagtgctgttgcggtgtcggcgtgctctgcgcctgcgccgccgcagccgctgcggcctcctcctgcgctttcctttcctcgtcggccttggtcttcgcgtcgatggaggcgttcaccttgtccatggcgtcggtgatggccttctcgtcgcgcttgtcgatggaggcgcgcagcagggcgcgagaatattcgtcctgcaccttgccttcggaggaggaatacaatcgttcgccctgttcgaccgtatgggccagccgtgaggcgaacaccgcctccaccgctttcctcacccgtgcgagccgtttggcgttccgcttctccgtggatcgcagcgtgctcgcggtggcctgcgccgtttccgtgccgcctgcgcatgtggggatccgttcgcctgcggcgtatcgttcggacaggtcgttgagggtttccagggtttccgggtcggcgagcttgtcggccgtgaccgctttcgcctgtgcgagccggtcgccgtcgagatattcgaccagcttctgttcggctttcttcgccgcagcgtgggcggtggcgcagtccgccgtcgcctgttccagctcgcgtgcggccgtggcggattcatgcgatctccacgcggacatgccggcgaccgtgacgcaggccgcgagcaggatgccgcccgcggtcgtggctatgcgcctccattcgcgcacgggcatggcggcatcccggtcgccgaccggcgtgaggtcgatcgtgtcggcgagatcggccggctccacggcaccgccaacgtgctgcggttccgatgccggggcatcggccgggatatcattccccaccggattcgaggccgatggcagcgggccgatctcccacggatcgacggccgtgttcgcccggtcttcgcttccggcgtcgtccacgcatcgcgcatccggctccagcccgggcccgggctcgggttcgggttcggccggtggccggcgttccggttccggttctcgtgccgtgtcgatggcgacggcggtgccggcggcgattatggggcccatctcccatgggtccgtgctggaggtgttcatcggttcgggaagaggcgctggcgaaggctcgggcggtccggtgcggtggcggtcatgccgtcggcggcgtcggcctgccgttcgcgcagctgccgctgttccatgacccatgcgggatgctggccgtgttcgtgcgcgtccatgaggcagcgcgtgacctcgccctcgggtgaaaccgccgcgagccggcccagatggccggtgaacgcggcctcgggatcgccctgcatgaagctcatgtacgcggcggcctcaagcgcgccctcccttcgcgcggaatccgggatggtgttggacagccgccacagcagtgcgggtatgtcctggtggaactcgctgttggcgatctcgcgcacgttgtagtcggcctggtaccacggtttgacctggcccgaggcgaacaggggcaaggcgcgcggatcatgctcggcgaccatgaggaaacgggcgcgttccaggcccggcgatatcagcttggcgcacacggcgtcgcgcagccccgtgtcgccggacagcgatgccagcagtcccgccgtggcatggtctttttccgcgtccgcgccgatgcggtattgtccggcgcgcagcgagtcgagaaaatcgaatactgccaatgcggtttgcctgtcagccatgtgcaacctccagaggaatgatgatggtgcgaacaatgtcagagtcgatgatgcgtcgggtcgcgggccgctgcggggcgcaccgtctacaggccccatcgggagcacggctccacgggtccacggttccacgggttcacgggttcacgggcatgggaaaggccctccgccgggagaggctggcgaagggcctttcccatgcccggaacccgtcgtcgtaacgtctccttcgatcctcacgtatacgaaagaaccgcacctccgatcatcgaatctgaatttcttcagtccaacaatcggggtgcggttcagcttcggccgagagggaggacgtcaccttgcagccggtgcaaaagaaaaggccgggcggggaatccgctctcccgcccggcctttctactgtcctaccgtggccttacttcctgtgccgcgcggtctcggtttggtttccgcgacggcggaacagcatcaatcccactcccaagagcgcgaacgcggccaacgccacgatgggcgcggatacgccggtcttggcgagttggcgaatcgtcttcacgatggccggggtcgccggtgggatgtacgagttggtgaactcgggtcgggttccggtggttgtgaccatgccgggggtcgtggacggaccgtccccgacggcatcccccttggtcttgtcggtcggtgtggcgggcatggcgccggaatccttcgccgtaccgtccgtcggatcgtattcgactttggcggtcagattgccctgcaggtcgtcgcccacggtgacggtcacgtggtgttccgtcctgtcgtaggtgacgttcttctcgccggtgttcctttcccgaatcacgtaccggtgttcgccgcaatcgtcgatgccgttgttgtcacgaccgtaggtgagcggcttgaaccggatgtcgccgtccttgtcgttcctcgcgctgtcgatgaccttgccgtccttgtccacgagttcgaactcgaattcgtcggccttcagcccgcgtccggtcaagctcttcctggccgcgagttcgaccacgacgtcccccggacggtacgtgttgcggaagaggatgccttcctcgccgccctcgccgtcggagtaggagacggcggcgacgagccgatgggtcttcgcgtcctcggtgacggtgacggtgacggtgtggacggtcctgtcgtaggtgacgccgcccagattgccgtcctgttcggtcacggtgtacgtgtacacgccggcccggtcgaacgtgagcttgtcgaattcgagggttccttccccttcgcggacgtccgtcgccttgtcggattgcgcgtcgcgtggaacgcgggcgaaccgtttggtctggaggaggttgccgtcggaatccttcaattcggcggcgaactcgccatcgttcaaatcacgtccggtcagacgcttgcccgccttcacggtcacgtcaacgggtgtcggcgtgtacgtgttgtcgaatcggatgtcattggtctgaaggtcggcggttgccgcgagcatgccgtcttggtcggtgactgtgacggtcacatcgtattcctgagtggagtagccgatggtcttgtccgttccggcgagttccttcacgtggtacgtgtatgcgccgggcatggtgtagaccatttgtccgaatgcgaatccgcttcccttgttggacacggtttgcgttccgccttggcttccggctggcattggcatgtcgttcacgctgatggcgttgccgtccgaatcatgtgcggataccgcgttcaactggaacttgaattcaccgtcctgcggaacgcggctggttgccgtatccgtgttgacgatgtttttcacgccgctgatagagtatccgacgttcttcggactgtaatggttggtgaacgtgatgttcttgccgttagagccggtggtcggggtgacggtcttggatacgacggtcagcttgcccgtatggtcaacatccttgaccacgtaggagatggtcgcaaccgtcccatccttcgtgacgcccggaacggtcgtatcctgctccgacatggtgaacacgtaggtgccgacgagcgggaacgacagttggtcgaatcggatgttgccctgctggtcgttccgtttcgtctggtcggcgttcgacacgttggcgggcgcggactgttggtggagtgtgaaggcgaagtcttcgcccttgagcgtgtacttgttgcccttggacgcggtcatcttcttcactgcggtcggattgtccgtggcgggttgggcatggtacgtgttggtgaattccggaatgttggttccgttatcatacttcacgtcggctagcaattgtccttcgccattgtcggtgacggtgactttcacatgatgtttcgtagcatcataggtgacgccgcccttgtcgccgtggacttcgctgagcgtgtagtcgtacactcccgtcttcttgtaggagatggcgtcgaacaggacgtcgccccgctggtcgttggttttcaccgttccggcctgaccgcctgtcttgtcctcgacgcatgtgaactcgtattgtccggcttgcagttggatgcctgtatggtcggggtcgttgagggtcttgtgcgaacggaattgcacgctgaccggcttcgcctgatacgtgttcgtgaacgtggtcggataggccgcgttcgttctggtttgggccttcaaccgtccggtcaaatcgtcggtgacggtgatctgccacaatcccatgtgggaatcgtagttgacgccgcccgccgactggcggatttcacgcaccgtataggtgaacgtcttggacttgttgcctttcagctggctggcggtgaacgtcaacggctggaagcggatggtaccatcctcggcggcgttgacggtctgcacgggcacgcctaccgcccgctcgttgtcgaacagttggaattggaagtcggtgagcttcgcgtggctggcgtccgcgttgtcgaacgtcttgcgggcggtcaggtccacggtcacgtccttcggctggtacgtgttgcggaacaccggcgcgtccggcgtgttgtcgtaggtgacggcggcgttcaaccgtccgtacccgtcatcggtgaccgtcacgtgcatcatatgcacggtctggtcgtaggtgatgcccgccagtttgcctgactgttcgatgattcgataatcgtgttcgcctacggtgtcgtaggtgattttgtcgaacgttaccgtgccgttggccttgttcgccttggattggagggtcttcccgttcgcatcctgcaactcgaacgtgaactcgtcggcgttcaacaggcggagggttccggacggattggcgagcgtcttgcgggctttcggcgtgaccgtgacgggctggctggaatacgagttgacgaaccgtccttcggtttcggacgggttggtgacggtcgccttcaactggccactgttgtcgtccgtgaccgtcaccgtccacgccgcatgatgtccgtcgtattggactcccgcagcgcccgtattgcgttcacgcacggaatagcggaacacggccctgtccctgccgttcagtctcgccttggtgaacaggagcggggcgaactcgaccctgccgtccgccgtggcgttcacggtttggatgggcgtgccggtcgccttgtcgttcgcgtacagatcgaactggaagtcggtaatcttcgtggccgacctgtccgcgtccgtgaacagtttgctcgccgtgatgcgcgcctgcgtgtccttcggcgcgtacgtgttcgtgaactggatggcgtcggattggacgccgtcgcacgtcgtgttggcggtgatgcgacgggtgaacgtggtcaaatcgtccgtgacggtgacggtcagaatccaagtgcggtcgtcgtaggtgactcccgcattgtctcccttgcgttccttgacctgataccggtagacgccgtccgtggggaacgcgttggagttgatttggagcgtctgcgtcctgttgtcggcgaacgtgatggtggagggcaccgcgttcgcgggcgcgccgtccaacgcggtgatgtccgcgacgtacctgtccctgtcggtccaagcgccgttcggacgcccgtccagcaccttgaccgccttgaacgtggcgggcgtggcgggcatgagcgtgccgctcatgccgtggtcctcgttcggatcctcgtacacggcggacgtcatcttatccaacgcggggaacggtttcagcgtgatgacgccggcgaccatgttgccgtgcgaatcgtcctcccggtcgctgtcggagtcggtcgcctcgctggcgtccttcgcgttcttgacggtgacgttctgcccgtgccaagcggtgccggttttcggcgtgaacctgagcttgaacccggaacctgccggaatggaaccgatttcgtagtggccgttcctgtcggttgtggcggtgcagggtttgccgtccacactggtgactgtcctgccgttcgcgtccaccagcgtgacgttcacgtccgcgagaagcctgtccgaatcctgtcggatgccgtcatgattggtgtcgaaccatgcgacgccgttgaccttgcgttccacgacctgcgtgaccgcgtccaccttgttgtcgccgtccgcccaacggttcacatacgcgtcagccgccttgttgcctgtaggcctgatgctcaggctgaaatcgtagcgggcgttggcgggcaggcttggcgaggtgaacgcccatgccaccggcttgctgtagccgtcggggatggtcaccttgcctgtggtcgcattcaccgtggcttcggtccattgttggacctgttcgcgggttatcttcgtcgcgtccacgttgcgccacttctggtcggtcgtgaagtagactctgacgccgttcatgcttgcgcccgcacccgccctgacggtgagtccggccagagtgtagtcgccgtgatagttggactggttcaagcccttgtagggcatgacgtccaccgcatacgggtcggttttctcatccttggagaagttgcccagcatgttcctgaatcccaacgggcggttgatgtcgttcagcagcgggtcggcgcgggtcgccagcgcggtcgcgcgcgtgcgggacacgcgaaccgtcatgtcggctatctgcgcctttggagccaatgggggagccatgttgcgtttcgactggatggtcgcatggttcgtgaacgaatcgttgttcctcacgtcatggtcggggtcggacgcgtccccgatggtggtggaatagtggatgacggtctgcgtgccggagtcggcgcgcgccccgttcaccctgatggtcatggtggtggtgccgtccttgttcacgacgatcgtcggcgtgacgggggtgccgccggtgaccgtgcccttgtcgggcgtatgctgcgagtattggccgccgaccgtcatggaaccgtccacgtaggtcaggcccttgggcagcgtgtcggtgatgatgtagtcggtcgtgtactgtccgccgtccgtggtcgtggacgtgtcggcggtggcggtgagcttccagtccaccgcacgctgttccttgtccaaatcgtagacggttttaacgttgccggcttcgttggtttgcgcgacctgtttggcgatgtgcggtgtttcgccggctatgtacaggctgtcgcctttcaagaagtcggcggtgtcgccgccctgatagacgccgttttcgtcgaacgtggcgggacggtacgtgtcgccgctgtaggtcaggtcgggtttcacgctgttcgcgtattcgggcagtcggatggcgagactgtcggaccattgctgccattgcgtgttggatgcgtccgcgtccaggttcgcggtccgggcgaggctgttgcgcgtccagtaggcggtttcggcgacgatgggcgtgaccgtgccgattctcgcggtgtcgaggatgcgggcgggcaggacgacgatgggcgtgaatcttcggttgaagctcgtgccggtcgggtccaccgtgttgtggtcttcgaacagcatgccgactaccgtgccatgggttttcgcctcgttgagggtcggatagtagtcgagtccgctgattttcgtgtcgcgctgctccctgtagtccttccagttggtgccgtcctttttgacggcataccagtaagggattgcgttcccccgtttggctgccctcgcgccccaagtccaaacgttcatggggatggtcggctgcgtgtcgggatggtcgtccaccggttcgatgctgttcgggtcgaatttgaccaggcccatgcccatcacttcggcgtcgccttcggagttgatgatgatgttgtggcctatttggaggcgtagtttcgacccctgtacgagactgtcggacccgttgacgctgtcgggcatcgtccagtcgccgctcgtgcccgcatcgttccatgacgtgctgttgttccagtgcgtgtatcggatgcgcgtactgtacgtgcccggcgtgcggacggtcagggccgaacccgcatggtcgtcaccggtggcggcctggttcgaattgtcttccgccgtggcgagacggtctccgctgacgccggtggccgtcaatcccatgtcgtccatggtgatgttggccgtctggtccacgttcccgtaatattgcgccacggtccggccgtcacggctggtgggcgtgatgaactgcaatacgtccgtgtggatggctccgacctgcatggtggagcagtccgacgtcatgtaatccgtgctgcatttatcatatgggctgcccacattattgtgggtggggaagacggacgtgtcgtagccgtcgaacgagacggtcacgtccgtgccctgcccgccggtcgtggtcgtgattgtcgtgtttccacgcgccacactgtcatatccgtccgcacggtcggcgacgcccggaacatgatgcagtaggtcaatatctgcgaacgtccgcccatacttcgaataattgtcgccgtcgatatgcccgtaatcgtagagcaacggctgccaacggcgttccatcggatgcttcgtcccggcctgcgtatcatccgaatactggttggacaggcgaagcctataggtgatcctgccggacggagcctccaaacccttcaaacccttcgtccggtcgggccaacgcatctccgtgaccaatgcgatgcccgaacccaagccggtcaccttgccctcgtccttgttgggcgcgttcgccgcacccgaggagaagtcgaacacgcccctgtccacgttgccgtagttgaccatgcgcacgttcaggttgagtttcgcgctgacggtcacatccttcggcgtgtcctcggcccgtttgtgcgtgcccgtgttcgtcgggttcgaggcgtcccatgcgggccacgccttgacggtcggatggaaccggtagccgtggggcgcgcccttgacggcgaccgacaggccgatggaaccggtgccggggttcacggtcggcgactggctggtcggctccaacagacggtagcaggtgtacacctgcgtgacggtcccgtcgatggtttccgtggtgagtttcggctcgtagccgggcgtatggtccacccagcccatcttctccgcgtcgaacgtgaccttgtccttcgggtagggcagttcgaaccggaagccgacgcgcgtgcgccgatagtagtccatggtcgagtcgggggtgagcgtgtactcgtagtcgtaggtcacggtgtcgtacgagcggacgatgtcgttgttctcgtccttgtcgtcgccgcgcgcgttgtccgcgtcgaacggcgcggtgccggtgatgcggtcgatgagcctgagcctgctcacggtggcgctgtccgtgtcgagcatgtcgtggacggtcacgtccggcgcggcctgacccgcatccgcctgcggagcggattgcgcgggcgcaccggtgccggattgttcgtccgccccggttccggcctcgtcgccggaaccggtgtcgggtttcgtcgcggcctcgtcgccgcctgtggtcgtcttgccgggttcggcttggattcgcgtggacgtgcccatggtcgtatcgtccgcatacgcggcggacacggccgacgcgcctgagccgaacagcgtcacggacgcgagtatgagcgcggcgacctttctcagaccgggtttcatcgtctttcggttcctttcgggaatgtgccgtgaatgaatacggctgttccaatagtgtgtgggggatgggtcccaagtacggtttgcaggagagttcccgggacccgtccccggttttatgtgaagtcaatggagggcgttccggccgtcatcggacgacgaggccggaacgccacggggtcacttgcccgcgttcacggccgtgtggcggccggaaccctgtgcgcagtggcgcttgcggaacacgagcagggagccgccggcgagcagcaccgccagagcgccgccggcaaggccgagcacggccgcgccggtggaggccaacggcttggcacggtatccgttccagtcgtcggtgttgctggtggtctgggtgtcggcgcacagctgcttgccgtcgatctcggtcacgtcgccggtggagtattccggatcggtgtcttcgccgccgtcggtcttgtcgttgaacgggtcgccgttggacggcgcgcattccacgagcggggtgccggtgacgatggcgcggtccgtgtgggtatcgccttccttgacgcccttgagcgtgccggtcacgctgaccgattcgcccggcttgagcaccagggtgtcccagttgtcggggtaggtgagcgaatccatgtccacgtgcgcgtcgccgacgatggtggagtcgtcgaggttcaggtcgcttgccttgtaccatgcgccgtcgccggtggccgggtcggtcttggaggtgttggtgatgatgaacgtgatgccgatgttgtcggcgtccatcttcagcgcctgcttcgggtcgtcgcggtccgcctgctcctggccgtcctgcttgagggtcggggtatcgaccttttcgaggtggatgctcggggtcatgtccggggtcttggtgacgaccttgttggattcgcgcggctggccgttgatggtctcggtccacgtgttgggcacctcgtcggccacggcgatgcgcttgcactggaggtagagcacccagccggcctcgtgctcgttgtcggcgcttaccaggtcgaggtaggtctgggtcgcgtcggccgtgaccttgccgttgtcgtcggcgtccacggtgaacaggttgccgccgaacttcgaggagtcgaagccgctgcccgcgatcttctcgcccttggccgcgagcatctggccgtccctgtacaggtcgcggctggcgtagacggcccagttgcccaggtactggtcgtactcggtgttcagctggtccgtgccgccccagtccgtgacggtctggtaggcgcggtccgggggcaggatgctggaatccagtcggtagaggaacgtgtggttcagatacacgctcttgccgtcgatgctgtcgccgccgaccttcacggtcacgtccttggtcgggttgatctccttcagcgggttggtgacggtgttggtcttgtcgcgcttgtcgttcgtgacctgcgtggcggtgttctccaccgtgtggccgtccttgaccttggtgacggtcatcggcatgaccacctggtaggtgtggcccagcagcgactggtcgatgctcgggtccttcagcgggtcgtaatccttgtcggttttctcgctgtaggccttcaggtcgtcgggttgcgggtcgccgggcacggtctcgccggtcgcggggatctgggtgtccacggttttggcgaaggcgtagagcacgccgtccttgtcctggatgttgaactcgccggtgcggtccctgccggtctcgtcaaggatctccacgtgcttcgcgtcgagggtcaggtactcctggtcgtagtcgtccgtcatgcccagtcgccataccttgtaggcggtgtcggtgagcctggaggcgtcgatgttgacgcggtagtacaccttgtcgcccagcagcgcggtcttgccgtcgatgctgatggtcgggtccttctgcgtgtcctgcttggagggcttgatcgtcggcggctcgttctcgaccttgttggacggggtgacgccgttgttgacggtcagcgcggccttgttgtcgacggtcttgtcggtgggcgcgtcctcgttcaccttggcctcgaagcgcagcagcacgcgcgggttggagccggccttccagttggcggcaacccagtccttggcgaacgtggcctcgaacgagtggttggcttcgtcccactgcaccttgtaggcgctcttcgggatgatgccgccggttcccaggtcggtgatctccagggtctgcttgttcgcggtggtgtactcggaataggtgtcgctcagcttgatggcggtcaccgaatatgcctggtccgcagggatctgcgggtccacgcgcacggtgtattccacggtctggccggggaacacggtcttggtgtcgatgctggactggtcgccgccctgggaggattcggcgatgacctgcttgtggatcgggggcacggtcacgcagatcttcggcgtgttggtgtccaccgtgctgccgccgaccgtctggccgcccttgttgtcgaggtcgtcgcccttcgggtccgcgcacgtgttgagctcgtcgccctccgccttgccgtaggattcgagcagcttcacggtgtcgaagttcacgtcgaaggggatcacgacgctgatctgcttcgcggtcttcaggtccttctgcgcggcctcgtaggagtccttcgcgctgaccgtgaccttggtgccctcggcggtgatgtcgaactggtcggtcacgtccctgccggtcttgttcaggtcgttgacgccggcgttggcctcgtcggtggtgtcctgctcgtagaccttgatgttggaggtgtccttcaggtcgaggatgctatcgacgttggcgaagtcgtcggtccacgcgatctcgggcacgcggcccaatcctgtgggcagggtgccggagatgaccgccgccacctcgtcgccgagacggtagtacttgtcgtcgccgcccaccttgtcggtcttggtcggatcgacggtcagctgccacttgccgccgaccttcatggcccacgccttgttggggttgggcgtccacacgaacaccggcggctcgttggtcggtcgggtctcgttgttccacttctcgtacgccttgttggtcagctggatcttcttgccctcggtggcaccctttttgatggtgcccgtcaggtagaacctgaccttgctcgcgctgttcctgaacatcgtcttggcgatgtacgaagccttcgcggtggcggtcgcggtcccggccttccggtcgatcgcgatggtgaagttcgcggtctcgtccttgccgtcgacgaacaccttgccggacttccagtcgatccactggatcgaaccggtcagatcatcggtgatggaataggatgccagcgggttgagcaagtggctcgggatgctgccgttgacgaccacgcccacctggtcgcccaccaggaacgtcttctgatcgacgccctgctggttggtccaacccttgtcctcggccacgagagcgccggactcgtccagcacccacaccttgtccggggtcggcgtgaccttgcccacgctgtcgctgttgccggtctggcagtcggccaggctgccggtgccgttgtctccgttccagcacgccacggaaccgtcgttgatctcgtagtcgccgccggtgggcttggccgactgtggcacgttcagcgtgtagaggccggaatgcggggcggtggcgtgcgccttgaccacgcgcttgccatcgatggaatcgtcgatggaaatgtccgccggcacgatgttgccgttcgcgtcggtcacggtcaccttgctcacgtcgtcctgctcggtgccgccgatcaccacgtccctggtgtcgatcgtgtcgtagatccagaacttgccggaggcgttggaatgcgccttgatgtgagccgtgtacagcgagccggacgcgatggagtcgttgccgtcccgcaccgtgtcgccggcctcgttggtcagccatttctcgggcggggtggtggtcttctcgccggactccttgccgtcgttctctcccttgtgggagaccgcctcggccatgttgccctgcttcgccacgtcaacgtcccaccagcgcttgcccgcaggccacgactcccacgaggcgtccatgtccttgaaggacgcgctcactgtggcgccgcccttgttggatgcggtgaactgcttcgccaccgtcttctcggtgccgtcgatgccacgccagtgcagggtcgcggtgccgttcacgttctcggtcttcgacccgtcgctggacagggtgatcgtgtccgaagcatccttggtgtcgcccgactggcccgacatctccgcagcctgcgtgctcacgctcaaatgatacgacggtggtgccggctggtacttgtccagcacgatcaccacgatcgacggcttgctggaaacctccacattacgacgcatgatcgcatccacgctgttcgacggatcatccgagaagccatcggatgtgtggtaattctgagtgcctgcatatttataggtgttcggtgcgacgtaggtgttccagttgtcgtaccagccaccggtcccggtcggcgaagccacgccggacccgttgtagatgtagttgccgccgatgacggctggcaccgcgccgaccgcgaccactcggcagtcgccgttgccctcgccggggtgacgccgctggaaaccggtctcgcattccgtgcgggcctggtccaatgcggcctgcgccttcgtgacgccatcgccctccaacgtcacgccggcattgttcatggcggcgcgcaccgaatcaagactcgtggccggaccccaagcgcccgaagcatcgtccttgtactgccagaactgcaccgcggccagatcgccgcccgtgccgggctggttgccgccgccaccgcccgcgaacgcggtcgatgcgacgacgccgccggcaccaagcgtggcgatcgcagccaccgccgcgacaccggccttcatcatcttcctgccaaagttcatgtaaatgaacctccattaaccttgtctgttcatcccctccctcaatcgttccggtcatggccccgccgcctcttttttcaaagggtggcggggcttccgaccgcaggaataacgggaggtagccaccggttgccccggcagccaccaacaagcctcacagacgacacgccgaaccacggagcatggcatctacaaaaaatccggaagtatttcccggcaatacgggtacacgggaataagggaatacaggttcgcgggaacatgtcccttcctcacaaaatccatgaaaaaaggcccgcaccgattccccagtgcgggccacaaacagccaatcatcaatcagtgctgaataagattgttcggcggaacatagcagtcctcagtgcagccgtatgcgccgttgaggttcggctttggggcggaggcggcggccgggccggagccgcccgatgtggtgccacggtatgtgttggagccggaagtggagccttccgtgcgcccgtacgcgccgccggagtaggaggagacgccgctgtaggtggattgggcctgcgcctgagcctgggctgccgctgcggcggcttgcgcatccgcgtccgtctttgcctggacgctcgcgttcacgccattgatggcatcctccagcgttttgcgcgccccgtcgatcttcgccggatcgttcccgtccttcagcccgttcgccgcgtcgatggcgttcgacaatgcgtcgcgggtggcgttgtccgcgaccttgccgtccgaatccgcaagcagcttcgacgcctcgtccagcttcgccgtcagattcgttttcgcgtcatccagcctcttcgcggccttggattcgacgacggccctcaccgccttcgacaggctcttctcgtgggtctcgtaccagtcggcctgttcattgagcttcacggcggcggcatccagtccttgcgcgttttcggccacgcagccctcgtattcgggtgccgaggccttgagctccttgcccaaggattcgacggtcttcgagtccttgacctgttcggccttgacggcggcggcatcggcggcatcgccgttgagcagcgcgttgtattcattggcattgttgcgcacggtgtcggcggcggtgacgcacgcctccttggcctcggcgagcttcgcgccgctgtaagcgttccagccgatgatgccggccacgaccagaatcaccgcgcagacggccgcgaccaggggcagcagccacttcggacacttccttccatccttgcttggctctgtgatgttctcggcgggtgtttcgacgggttcgaggatttccgtcttgtcgttctcgttcatcattgttctccttgcattgataacgctttattgatctgccgggatacccgcgtcggattgcagcgtttcccgcgcgatgtcgagtagccgctcgtcgcggccgggttgggcgtccgctgtgtgggggagccagtcctgatcgacgtcgagggtcaggtcatcgaaggcctgttgcccgtcatcgcggcccagcaggccgcgtagcctgaacgtctcgttcatgtgctgtccgtcccattcgatgcgccgggcgtacagcaggaaatccagagtaaggaaccccggcccggccttgtccacctgcacgtaccgggagcgcgtcggcgtgaatctcacccgcggcacgcctttcagccgttcgtgcaacgggctgtccggcacgatgtagcgtttgaccaggttctgtccgccggccgcgaagaacagcatctgcggcagattgccgtaggtcgcgtcgtagtagcgccatccctggtcgtcccgccatttgcgaagcatgtcacgggcggcccccggccccagatggatgccggagaaccgttcccacgccagcgccacccggtcgaactcgccgcgcatgagaccatacagggcccgcccggtctggtccttcggatgacgtctcgctcggatgtccgtccgatggttcggatccgcatacgggcagtgcaggtaggcgtcctcgtcgtagcggcacaggcccggcacgtcgccccggtggtgtcgcccgtagggccggcgcgcacggctttcctcctgccggcggaacaggccgacgatctggatgggattgtcgcacagcgggcacaccgcgtagtaggacggccccttgtcgccgtcacgacgccacggggccacgccgccggtgcaccccatgtatgactcctggctgatcacgatgctttccgcccttcccggccatgccttgaacacatccatagccagctcccctcgccgcgcatcgtcgtcattgatacctcctgttgatattaacccaccaatccgccggcagctcgggcaccgcgccctcgcgttcggcgaacgcgaggcacgcaagcaccgtgcgcaatcccaacgggaactcccgccgtccctgacgcatcaggaacgtccagtcctccacgcagtcctcgcaatccgaatgatccatgatcccgcgacgggccagcacggcccgctcctcgatgtcatccgtcatcatccactccttcttccgtcttgcttcgcctcggcccttgcgtccgccgcgtcgaggggagggcagtcgcattcgatccatgccgtgagcatgtcgcggatggtggtgccgcgtcgcacggcctcggccttgaaccgtttcttgagctcggggtcgagctccaccgtgatcttgggcagcttgaccggtttcttgtagtccgtgagcgtcgatgccagcatgttcctcgtggtcatcggcttgttgatctccatgatgttgttcctttccgtgtccccgtatccacgggtttacgtggatacgggattgcgggtttccggttctgcgggtgtcaggcggcgaatgcgtcgctgagttccttggcgataagcccgtagcccgaagcggacgggaaccggccctcgtccgatgcgagacgcatggcctccttgtacgggatggtctcttggcatcgggccagtccgttctcggccaggaactcctcggcgtgcctgaggctgcgcgtgccgtagcgggtctgggtcagcagcaccgaggagggcttgttgatctgccggatggtctccagcatgcgttccaggtcgatggggccggtggtggtgacgagcagcacgaggtcggccgcgtccaccgccgcctccaccagatcggtctgcaagggaggcgtgtcgatcagcacccattcctcctcggcgggcgcggcgacggtgaaccggttgacgacctccaccccgaagggcagtgggcggccggccgatagggccttgtgcgcccacagggtcgccgcgccggacgggtcggcgtcgcgcaccgtcacggtatggcccagtcgggcgagtgcttcggcggtgccgatggcgctggtggtcttgccgaccccgcccttgaggttgacgaaggccaccgttttcgtgttcgtggtcattgggattgttcctttcattcgggtttccggcttcccgtgtccacgggtgcacggttccacggtttgccgcgtatacgggtttccggaatggttcgtccttatggggccggaccggttatctgtatcggattgtcttcagaagagggtgtcctgcaagggcggggtgtgtgtggcggcggccggggccttcgccttgccggtcgagcgtgtggtggcgcgccatcgttgctggcgtgcgttgcgctgctcggtcttgcggcgcttgcattcgcgttcgcgtgccgccgccacgatctcggggttctcgcggatgaatcgcgcaagacgctgttcggcggtcgggtcgtcggggtcgaaccggaatccggcctcctgcgcggtcttcagcacctggcgtcgggccctcaacggcagtccgccgtagatgccgtactggtcccggaccatgatgccgaacgcgaggcattcggccctgaccgggcaggcctcgcagatccgcaccgccgcgcggcgcagctcgtattgggttcgccggttgggcaggtcgtcgggcccccacatgcggtccgaccacgagtcggggaaatccgcgcattcgcctttcaggaacatgccggcacctccttcggcccacggccgccgatgaagccgaaacggacggacgccggcccggtcccggacggcttccgccgcccgaagccgtcgtccttctccctggattccgcgtccaggaaggcgcggcccgcccgcaatgcctccagcacggccccgcgttcgccttcggcatcgttcgcggggacgcgcttcaacagccggcgcagggtgcgcggtgcctcgaacccgtcattgcccgcatcgaagtcgtaagggtcgagcagtttccacacgcgccggtccaggttgtcggggatcccgtagttcggcaccttctccctggattccgcgctcggcggctgcgccgtttcgcccttgtcggcgaggacgccgtgtccggcgagcaggcgacgcccgtgggggtcgtcggccatctggaggcatacctggtcccagtgccgtgcgagggagcgggggccggtgagcgtgcgacgccagaaaccgtcatacggtttgccggaagcgtcgcccttgtcggtcttggaaggcggcagcgacacccattcggccacggccagcaccagtggcatgccgtggcgggcgatcagccgtcgggcggcgtcgagttcgcgtttgccgggccgggccaacggttcaggcaccggcatcggcggcatggcgcgcagcccgtccgccatcgtgcggcacaccgcctccgcgtcggaaccggccccggcggattcgctgctcgggggttcggctccggcggcgtcggcccatgaaccgtcctcgcggattccgtcatcgtccggggaggtctctccgcttgcggggagatgccccgtaggggcagaggggttattacgtactagggacgtactgtagctcaccaggtgagctgggggtggggtcacagctgtgaaccgtggttcacccgtgagctggggtttcccggcatctccctcgccataaccacggttcacaggtgagccgtggttatcaccggattccgtgtcggaacccaggtccacaggtgagccggggtttccctttgccttgttttccgttgagggtcgtcctcctcgggtcgaatcgatatcgttcgagtcgaagaagtcggggtcgagctccagacggttcttcaggcaaaggtcccatacgacgggccggtgccactcgctgaaatgcccggcctgacgttggtcgccacgacggatcagcccgttcgcttccagccatgacaggtggcgtttgaccgtgctcacgctgcacttgcaccacgccgccagctttctgtgcgtcggatgcgcgttgcgtccctcgtcgtcggccacgttcgccagacacatcagcacgcgagcggcaccattgtgcttggcatccaccggcgcgaacctgagcgcccaatcgaccgcgttcacgctcatgacgcacctcctgacctgatcgagtccaaccgggcgcgcagcaccgggatgctgggcacgggaacatcgagcatcatcgacagatagaaatcctgactgccatctcggggagcggaggccaacaggccaagaccggccccgcgagacgggaaacgcgggcgaacgtcggcggacggctgcttctcatgccgtttcatggcgttcctccttctcctggccgcatgacgcggctgacgcccagcgctcctccatctcgtcacgacgagtggccgcgcggcacagggcgaacgtcagcagacaggacgcggcgagaatgatgacgatggcgatcacgagtacgaggtgcatcatcgcccgcccccattgatcgcgcgagggaggccagcagacggaccacaagaagcacgatgccgactgccagacgcaggaacggcagcagcaggccgaaacaggccaccgcgagcaccacgaacagcaggatcaccaattccaccattcatcacccccgctcaccgagggatgcctgagcatcgagaacaccgcgtcatcgccgctgagggcctccacgtcgcgcatcaacgcgtcgatctcgtcggacaccatgcccgcaccggcctcgtagccgcgattgaacacgcaatccgacggaccgccatggatcagacgacggttcaccgtccgagccggcgacgaagcgttccgcacgtcacgaagcgcgtcatgccggccgatcagataggcgaccgccatgatctccctcacggtcatcgacgcatccacggacagggacaacagggacatgtagtcccggaaattcgagcgctcctcgttatcgagggaacgcgcgccaacggtcacggtcattgcctcacctccgcgtgaagggaccagaaagcgaaatcccaggcatcgcgcgagttccggtcgcaccaacggccggcaaggaccatcacgcaggccaaaggcaccagaagcacggccggcacgaggagattcctcgcggcaagcagaatcgccagaaaaaccacgcacgacaacgcggccagcatccaagcggcaagacccgccagctcgtagcgccgggcagagcgccgccaatacagggattcggaaaatgtagacgccatgcaccgcgaaccattcacgggggcgttaccatcaaaatcagaagtcggcacagcgacttcggttacactagacatttgtgcagcctccataatctaaaaggcaatgcgaacgattcaaaagtttggcgactagggaatcgttcaacattggatgtgttgcatacgcccggtttcgatgtaccagatcaagaccgggcattcttttatcagacagacacctcctccgaatggggaataacggtgatacccagtacgaaatcagaagaaagaccatagtggtcatgaagaaacagcaagtccttctgctgccaagctgtctcgccattgaccttcttgcagatcgatgacggcgactggcccatgatcgcagcgaaatcgcgataagaaagaccgttctctaccagccactccttcatcgacatgtttcccctttggtaacttgattctttataagatacacattaatgtttcatttgaggaaacgcaaattatgctgtacgataggcgtgtcgcttaaagatacaaatacttttcaaggagccataaatgacaacagttgcacttatgcccattgcggaagaggccgatgctgccgttgcttatgccgaaggaacagtgtcatggaacatcaaaatgatgctcatgacgcagggcaaatcacaaaccgccttagcggatgcgctgggcgtgcaacgtgctgcaatatcaaagaagattcgaggttccgtatcttggtctttggccgacctcgtgcgtgcagcagactttcttgatactgatatttcgacgctgcttgacgattcgctgatgaagcagcttcaggggatgggtaacagaaaagccaccggcgacacgccgatggcttcaggtgagctcctgcggctgggcttgaaccagcgaccgtccgattaacagtcggatgctctgccaactgagctacgcaggaatgtctgctgtgtttgagatttctctcgcgcacaagtcacatatcttacatgcctgccacgaaaaagcaaattacatgcgtgtagggcatgtcgcgctgaattccgcagaatcggactcatcggatactatctcatacagccaaaaaccgaacgcggatatacactagcgactaacggtagaggagctggctatggaacggcgaatactgatgaaatgctcagcccccgggaggagctggtgtctgcttggcaaatactggaatcggtgaaacggaacaaccgtctgagtatgcgaacccagtgggaacaatcacaagagttctgatgttccgctgtcactgcatggcagcggttgtgacatggatcggccgcggctgaaggtcgaacaacatgacgatgcggcgatactgtcacgcgaaatttcattgtggataacttcggaagctagaaccacataggtcgttttggctggacatcctgtttcggacccctcaaggtgggtatcaccggcaaagaagccggaatcacatcacactcacactatggggaggaatctcatgaatgcaccactgttgtttgattggcgtcgcgacgaagcccgacgtgccagccggcggcgtcagcaggcgcgtcagcgggctcaggaacggcaacggcgtatggatgccataatcgcgttggccgccgttatcggcctgctgcttgccttgggagtagggctggcatccacgcctcagcatgttgcgtatgcggatactgcggtgaccggagatgcggcatacacggtggaggatttcaccgatatgtctgatttggcgtggcgcaatggcaatcagtgcgaatcccgattcgactggccggtcgacgatccacaggtcgaacaacagttcgagcggccgatcaacccgtgggcaccaggtcatcgtggagtggatcttgttgcggagcaaggtaccgtaattctgtcaccacaggcagggaccgtgagttttgctggcaaagtagctggcaaagatgtggtgagtgtacggcatcgtggaggtgtcacgtcgacattcgaaccggccgttaccgagctctcagtgggggatacgatctcccgcagacagcccgtaggcatcgttgaaggcagctcggaccattgcgaagaccgttgcctgcattggggcctcaagcgaggaacggccgattatcttgatccacagcaatatgcggggagtcgaaaaatcgtactgaaaccgtcatgatttaacggtgattgtcggccggaacagggccgtacggaagagacatcgcaggcggctagcggcgtgacgagtatgaatcacagaccggcatcggccaaggaaatatatccggggtcgatcagcgcggacttgagattgctggcgctgacagccagcaacggttcgctgatggtcgggatcttcttcacgccgcctacctcggagttcctgattgaaggcatggaattcagcgcttcgtccttgttgagcttggcgcaggcctgagcgatatccgtggcgatggtctgtctgtcttccatgccggtcatccattgcttgccattgacgatggatgggatgttcgagacatacgcgccgtatccggttactagaggccactgcgagtcacggtccttgtcggaagcggaggtgtcctcgtccgcatcgtcatcggaactggatgagtcgtttgcgttgtcgttttcaggggatttgatcgggtccggcacggcgtcgcggctgagatccttcttgccggtgatattgccgacaatgcccgagatggtgatctgcggattgatatcggcggcagagccggtgtatcccagatcgtccaattccttgacgacctcggaggcgatgtagtcgttcatcgtgatgatgccgtcaatacgggtgagtgtggactgtccgtcggtttttgccagacgcttgtcaagcactttcgcagtggagccttccttagcggcatcgtaggccacggcttgccaatcgttttccgtggatttgccgtccaaggtgcctgaagggctttccacaacgcccttctgatagtaggagcccagtacctgccagataccacggaacgcctcttgggcgaacgtggaatcgttggcgttgcctttttcgtccacggcggtgtatggcagcagcacctcaatgtatttggggttgtctttactggccttatccaacttgagtttggacaccatcttttccgcctgtagcttgccgatggtctgggcgtccgagaacttgacgaaggcgtccggcttatatccctcgatactgttgccgagcaataccacatgcatgccggattccttggccagcttgagcgatgagaccagccggtccacggcctgcgcctgctcgtccgatgcagtgctgtcgctctcagtgttggacgaatcgtctttggacgagtcgtcttcggaagattcaccgtcagaagtagcttccccatccgtggcatcgttggtgctcaggttctggctgatgtaatcgccgtattggcgagtggaagcgtcggcctcgactactggagccacgagcaatgtcatgttgtcgggcgcgatggcaatgccggaatcgtccgtggtgttattcgaaagatgatcgaccacaaagtcttggatggcgcggctttgcttggccaacgagtcggacgtcgtatgatcgatatcgcctttcttgaaaccggcgtcggccagagccttggctaggtcaggcaccagcttcgcccatttgttcagtggcgtctgctggttcagcgtaatgccgtccgaaggtgtgaacacggccacgccgccggcagaattggacgtcaccgtggtttgaccatctacaacggtcttattgtctgaggtgcacgcggtcagtgacagcaccatcgcgcaggatgcgataatggcggcgagcagggtggttgagcggcgtgcgaacaccataagcggcgaaacctcctcaagcgggcgtgaaaacaagctgaatcacgattctagtaggccgtatacgaaaaagtcccggaccagtggacaaatcgccacatatccgggaacaattagaggtattacgtgcgtgcatcgaacaactgtcatgattatcgtgctgaggaacattccagatgaagcacgacaatcatgacagtttgcgacatgacatgacccatgtaggtccgcacgatgtgttcgatgatttactcggccagagccttggccaggttctcgtccagcgcgttcatgaagccgtcggtgtcgagccacggttcgtccgggccgatgagcatggccagatccttggtcatctgaccgccttcaacggtgtcgacgatgaccttctccagcgtcttggcgaagtgacggacttcgggcgtgccgtccagatcggcgcggtgcttaaggccgccggtccacgcgaagatggatgcgattgggttggtggaggtcttctcgcccttctgccagcggcggtagtgacgggtcacggtgccgtgcgccgcttcggcctcgacggtctggccgtccggggtcatgagcacggaggtcatgaggcccagcgaaccgaagccctgggccacggagtcggactgcacatcgccatcgtagttcttgcaggcccagatgtaaccgccgtgccacttcagggagctggccaccatgtcgtcgatcaggcggtgctcgtaagtcaggccggcctcggcgtacctgtccttgtattcggtctcgaacacctcggcaaagatgtccttgaactggccgtcgtaggccttcaaaatcgtgttcttggtggacaagtacaccgggtaatgacgcatcaggccgtagttgaagcaggcgcgagcgaaaccgcggatcgaatcgttgacgttgtactgcacctgggccacgccgccgtcttcgccgtagttgtagaccacgtgctgaatcggctcggagccatcgtccggagtgaaggtgacggtcagctggccggctcccggaaccttgaaatcggtggccttgtactggtcgccgaatgcgtgacgggctacgacgatcggcttggtccagccgggcaccagacgaggcacgttgctcatcacaatcggctcgcggaagatcgtgccgcccaggatgttgcggatggtgccgttgggggacttccacatcttcttgagaccgaattccttgactcgggcctcatcgggggtgatggtggcgcacttgacaccgacatggtgcttctggatggcgtgggcggcgtcgatggtcacctggtcatcggtctcgtcgcggtgctcgatgcccagatcgtagtagtcgaggttcacgtcgaggtacggcaggatcagacgatccttgatgtccttccagatcacgcgggtcatctcgtcgccgtcgagttcgacgacagtgccttcgaccttgattttggccatgcttcctcctgatagatggtgtgaagatgatttagtcatagcgcatgtttgtaacgacttgaagcagtcgtccggtccgtgggaaacggccttgttggcgtcccacccgggcaataggctggaaaccatgtctcaggaaattgaaatcggtttgggcaaaaaaggccgtctcggctacgcactcgacgatgtggcaatcgtcccctcccgtcgcacccgcgaccccgaggacgtctccacctcttggcagatcgacgcctatgagttcgatgtgccggtgatcggcgcccccatggattcggtgaccagcccggccaccgccatcgccatgggcaagatgggtgcgctcggcgtgctcgatctggaaggtctgtggacccgttacgaggatccgaccccgctgttggacgaaatcgccggactgccggccgatcaggccaccgagcgtatccagcagatctatgccgagccggtcaagccggagctcatcacgcaacgtctgcacgagattcgcgccgccggtgtcaccgtggccggcgcgctctccccgcagcgcacccagcagttctactccaccgtggtggacgcgggcgtggacctgttcgtgatccgcggcactgtggtctccgccgagcacgtctcctccggtcaggaaccgctgaacctcaagaagttcatctacgaccttgacgtgcccgtcatcgtcggcggcgcatccaactacaccgctgccctgcacctgatgcgcaccggcgcggccggcgtgctcgtcggcttcggcggcggcgcggtctccgccacccgccagaccatcggcgtgcaggccccgatggccaccgctatcgccgacgtggccgaggcccgccgcgactacatggacgaatccggcggccgctacgtgcaggtcatcgccgacggcggcatgggcgactccggcagcttcgtcaaggccctggccctcggcgccgacgcggtcatgctcggcgcgccgctggcccgcgccaccgaggcccccggcaagggcacccactggggttctgaagcccgccaccagacgctgccgcgcggctaccgcaccacggtcggcacggtcggcccgctcgaacaggtgctgttcggaccgagccaccaggcggacggcaagaccaacttcatcggcgccctcaagcgcgcgatggcctccaccggctacgtcgacgtgaagaacttccagcgttgcggcatggtggtcaacccgtattccgcacgataatcccgattgccccctgaaaatgggggtttgccctccatgcaggaggcttaacttgcccgaaggcgcgctcaagtagtttgacttggcgcgcctttcgtgatgttgtagtacagacgctcgccgatgatggtgagttgcaagggggcttgaagggggtcatcatggagtattcgggatttttccgcggcacatatcagtacgggccgttgccgagttatgacggattcatcgttgtggagctgtcggatcgcccggtgcggtatcacatccaacccacattcataggcgggctgaatgcgaaggaatgtcattccatggccatggctgcatgccgcatcgcctgcacatcggcggacgcgatacgtggcaaactcagcgtcgcacatctcaacagagccatgacaaaaccatgcctggaccggctgcaaaccatgcaatacctgctcggcatccacatggtcactcatccggagctcaaagcgaaattctgctatctgcccactgtccccacattgatcgacggcatgatcaccggcaaggacacgctggaaatggcggtattcatgaccatcggccaggaaaatctgcgagtcaacctcaaactgaagtacatcggttctcgatggatgtgcatctatgccgatttgggctgaccagacggccccgcccgcacaccgattcctacgctggtagcggaagacggttctgccgtgtcataggctggttcgcctatagtagtgaccatgcgtgaacatgtagaagaacccagatatgtcaccaccgatgacgacaccgtctactcgctgctgtccaaacgagcagctcgcacgccggatgacatcatcgcggaatggcaggatgacaacacccaccaatggcgcagcgccacagctactgaaatgctgtcccgcgtacgcgaggtggccaagggcctgttgggacttggcgtcaaagccggcaccatggtgctgatttactcgcctacctgctatgagtggggtgtggctgatttcgcttgcgcggcaatcggcgctgtggttgtgcccgtctatgagaccgattccgcccgtcagaccgcgggcatcgtcgaggaagtcgatcccgccatcgcctttgccggcgacttccagcgcgcacagacgcttgagcagatccgtgtcaatcatccgggcatgaaatacgtgttcaatttcaaggccgatggccttgacgctgtcgttgacttcgggcatggcgtatccgatgagacgttggatgcggctatcgctcgtatcaaagccgatgatctgctcaccgtggtctacacctccggttccaccggcaagcccaagggcgcgatgctctccaaccgcaattacacgcacatcgtgcttaacggctacgagattctgcgtggcatgctgtacgacgacaaccgtctgctgctgttcctgccgctggcgcactgcttcgcccgctacatccagtacgtgtgcatcggtggctgcggcgtggtcggatacattcccgacaccaagcgactgctcgccgatatccgcagcttcaagcccacctacctgctgggcgtgccacgtgtgttcgagaaggtgtataacgcggcctcgcagaaggctggtgccggcatccaggggcatatcttcgcccagtcggtcaagcacttcgtcaagtggagcaaggatgagcaggccggtcgcggccattcgttcatcgagcgcatgcgccattcgttctacatggccacggtgggcaaatccattcgttccgctctcggaccgaacctcaaatggctggcctgcggtggtgcgccgctcaacgtggatttggcccactttttcaacggcatgaatgacatcaccttcatccagggttatggcatgaccgaaaccgccgctccgatgctcgtcaattgggaggacgacaacgagatcggttcggtcggcaagcctgggcctggcatgggcgtgcgtcttggcgaagacgatgaaattgagctgaccggcccgaacgtgttccttggctactacaagcagcccgaactcaccgcacagacgatgactgccgacggctggatcaaaaccggcgatctgggtcgtatcgacgaccgcggcttcaccttcattaccggacgcaagaaggacatcatcatcaccgccggcggcaagaacatcagccccgccccgatggaggatgtcatcgacacctgcccgatcgtggctcatgcagtagtagtcggcgacggcaagccgttcgtgtccgcacttatcgagctcgaccccgaaatgctgcattcctggctggaaggtcagggcctcaatgccgacatgacactcgccgaggccagcgacaacgacgcggtgcgcgcctttatccagcagtacatcgaccaggccaacgccaatgtctcccgcgctgagtccgtgcgcaaattcgcggtgctggatgaggaattcagtcaggagcacggcacactcaccccgagcatgaaagtggtgcgtcccaaggtattgcagcgctacgccaccgtcatcgaggaggatctgtacgcgcccaagccatccaacaagccgctgcccgccactgccaagatcatcgacagcacgctggagaccgtcaagaaatcctccgaatcggtcaagcaggcgtccgaacaggtcaaacaggcctcggaacagatgaaaaccagcgtgtctgattcgattgctagcgtgtcggagaagatcaagaagtcgaaggccgaacccgaagagggcgagaccggcgattccgctgacaatgccgctgacaccggcagcaagccggaccagccggctgacgagaagaatgaggagtaacgagaagtggccatccgtgagatcagggtcgtgcccgacccagtcctgcgcaccccctgcgatgagatcaaggaaatcaccccggccgtgcgccgcctggttgacgacctgttggaaaccgtggacgatccgggccgagcgggcctgtccgccaaccagatcggcgtgagcctgagggccttctcctacaacatcgacggcaaggtcggctacgttctgaaccccgtactcgaggagaagtccggcgagcagtatggcgatgaaggttgtctgtccgtgcccggcttgtggtacaagacccgtcgtgccgactacgctcgcgtgcgtggcatcgacttggacggcaacgaggtcgtgctcgagggctccgggctgatgggccgtatgcttcagcacgaatgcgaccacctcgatggccacgtgtatttggatcgcctggaaaaggaagaacgccgcgaagccctgcgctacatgcgcaatcgtcaggcgaagtagtccatactcggctcccactggctggagccgtcgaacgtagtgagactgagggtggttctgccggtaccgcccgtgactcccctcagtcgcctacggcgacagctcccctcagagaggggagcctgtttttttttagtaccggctccgtgctattctcgaaactcgtgtgccacccggcaacggacgcagtcgctggtgtccagagccacccaatattgtcaaccggcacacaacaaattcgcgtcatgctcgcgacggcttgtgtcggtcggctgcacaactcgtgaaaccgggggagcagctgcacgcaggtgcgcatggccaggcaagaaccgacaatgaaaggtagtaataccatggctcagatcactatgagcgatatgctgaaggctggcctgcacttcggccaccagacccgtcgttggaacccgaagatgaagcagttcatcctcacccagcgcaacggcatccacatcatcaacctgttcaagtcgctcgacatgatcgacaaggcgtacgacttcatcaagaccaccgtggcccacaacggcaccgtgctcttcgtcggcaccaagaagcaggctcaggaagctatcgccaaccaggccacccgcgtgaacatgccctacgtctccgagcgttggctcggcggcatgctgaccaacttccagaccgtctccaagcgcgtcaaccgcctcaaggaacttgaggaaatggacttcaccgacgtgcacggctccggcctgaccaagaaggagctcctcctgctcgagcgcgagaaggacaagctcaacaagcagctgggcggtatccgcaacatgaaccgcaccccgtccgcgatgttcgtcgtcgacatcaccaaggaagccctggctgttgaggaagctcacaagctgggtatcccggttgtcgccatcgtcgacaccaacgccgacccggacaccgttgagtacccgatcccggccaacgatgacgccatccgcggcatcgaactgctgaccagcctgatggctgacgccgtcgccgaaggtctgctggagcgctccggcgccaacaaggccgagggcgaagccgccgagcagccgatggccgcttgggagaaggaactcctgaccaacgaggctcctgccgaggcttccgctgaagccgccgctccggctgccgccgagggcgaaaccgccgaggcccccaaggccgagtgatgctctacgatgggaagtgcctgaataagcgcttcccatcgttcacgggtaagcaaaatttctcaaggagaataatcaatggcagcaattaccgccgcactgatcaagcaggttcgtgaagacaccggcgccggcatgctcgacgtcaagaaggctctgaccgaagccgaaggcgacgtcgcccgcgccaaggaaatcatccgcgccaagggtatcgccgcagccggcaagcgtgaaggccgcaaggctcaggaaggcaccatcgcctccaaggtcgtcgagaccgccaatggcgagaccggctacgccgtcgagctgaactccgagaccgacttcgtggccaagaccccgaagttcgtcgagttcaccgaggaagttctcggctacgccgtggacgccgacgccaactccgctgacgagctgctcgaggccaaggctggcgacaccaccgtcaagctggctgtcgaagaggccgccgccctgttcggtgagcacgtcaaggtcggccagttcgccaagatctccggcgagcacgtcgaagtctacgctcacaagaagtccgccgagatgccgccgagcatcgtcgccatgatcgccaccgacaaggccggcgccgccgtggctcacgaagctgctctgcagatctccgccatgggcgccaagtggctgacccgcgaggacgttccggccgatgtggtcgagtccgagcgtcgcgtggccaccgagaagtccctggccgagggcaagccggagaagatcgttccgaagatcgtcgaaggccgtctcaacgctttcttcaaggaagtcgtgctgcttgagcagccgttcgtcaaggacccgtccaagaccgtcggcgacctgttcaaggaagtcggtggcaacgccaccgcattcgctcgtgtcgaggtcggcaagggcgaagaggagtgagcctaaggcttactccacgcgcttagcgtaatttcaacgaaacgccatccggttattcaataatcggatggcgtttcgctattccaagggtgtcgttgctagggggtgtcgtcgtaaaccgatacgcttgtctacggataatttcgcactttcggttttgagaaaggcacaatatgactgatagcgacaatccgcgcagagttctgctcaagctgtccggcgaagcattcggtggtggcaaggtcggcatcgatacccaggtgattcgtcgcattgccgaggagatcgttccggccgtacaacagggtgtgcaggtggccatcgtggtcggcggcggcaacttcttccgcggtgccgaactgcagcaggccggtatcgatcgttcccgtggcgactacatgggtatgctcggcacggtgatgaactgcctcgctctacaggactttctggagcaggaggggcaggccacccgcgtgcagaccgccatcaccatgggacaggtcgccgagccgtatattccgctcaaggccatccgtcaccttgaaaagggtcgcgtggtgattttcggcgccggtgccggcatgccgtacttctccaccgacacggtttccatccagcgttccctcgaaatccactgcgacgaggtacttatgggtaagaacggcgtcgacggcgtctacaccgccgacccgcgcaaggacgagaacgccaagcgttttgaaaccctgagctacaatcgcgccctcgtggacaatctggccgtcatggacgcctccgcactgtccatggcccgcgacaacaagaagcgcatccgcgtcttcggcctcgaagagccgggcaacgtgacccgcgccctcgtcggcgatgaaatcggcacgctggtctccaccgccgaatcgcgcgtggccgagtaagccgcaaacgcccacaatcgaatcaagcgttcatagacgaacaacactgacgaacaccaacacacaaggagtgaatatgtctcttatcgaccaggccaaggaacagatggccaagaccgtggaaaacaccaaggaaaacttctccggcatccgcaccggtcgcgcaaacccggccctgctcaacggcatcaccgtggactactatggtgcccccaccccgattaaggccgtcgcctccatcggcgttcccgaaccgcgcaccctgtccgtcaccccgtttgacgcttcccaggccggtgccgtcgaaaaggccctgcgcaactccgatctcggcatcagcccgaaccgtgatggcaacgtcatccgtctgaccatgccggaactcaccgaggatcgtcgtaaggaatacgtcaagctcgccaagggcaaggccgaggatggcaaggtcgccgtgcgcaacattcgccgtaagaccaaggaaaccatcgacaaggccgtcaaggacggcgagatgggtgaggacgaaggcgatcgcctgctgaaggatcttgacaaggtcaccaagtccgttaccgacgagatcgatactctgctggagaccaagcagaaggagatcatggaggtctgattcagaccaggtccggagaattatggaacgcaacgaacaaccccatgaagaggccgaggagacgctcgaccagatcaacaagaagaccggccgcaacatgccgcaggccatcgccacaggcgcggcactggtcatccttattgtcgcgtgcctgctgctcagcgtcgacctcttcgtgctgctggtagtcgtgttcatgattctggcgctgtgggagctcagggtggacttcgccaccgtaggcctgcacctcccggtgtttatgctgtggctgtgctcgtccttcaccctcattgccacctactattccccgtaccatctcatcacgatgtcgctgagtatcatcgtgtcgattattctggtcgccatcgcggccagcgcaaaaatcagcgtcggcaaccgcctatctctggcggttgccggcaaactgtccaacacggatgccagcgcgcgcctcgaatcctcgtttaatcatgagggcggggaacagcatcattcccggctcagccatgtggctgtgtccgtgcttaccgtgttgtatattccgttgttggccagctgcgtcatcatctcactgacttttaatgggcatccgattgcacacgccatcatgctggtgttcctacccgccctatccgatacgggcggtttgtttgccggtgcctggctcggcaaacacaagctcagcccgcgcatctcgccgaagaagtccgttgagggccttgtcggctcgatgctcttcgccatggctggcgcatttgccgtattcgcatgcacgtatgatgcctcgaaatgggccactcgttggtgggtgccgatcgtggcgggtattctcatcggtgccgtgggcacgttcggtgatttgtgtgcttccatgctcaagcgcgatatcggtatcaaagacatgggccatctgctcaaggggcacggcggtgtgatggatcgtgtggattccattttgatgagtgcaccgttcacctgcgccttgctgtggatcaccggactgtgattcgcatgtctcgtgcatgaacaatgtggcatcgtgtgtatatcgcacggtgccacataccatatatggggaaatcatcgttcaatatgcgttcgctatgggctaagacatgggccatctgattcgtatgcggcacgccgtatggtggattctgatattactattgcatgtttgactattttctgatattgagagcgaagcgaacccatcatgaccacacagcatcctgacactccggaaaccggcattactcccggcggcacatcaggtgccttccgtgacgtgctatccaaggaccatgcccgccgtggtaagccgccgctgcactttgtggatatgacgcccgagcagcgcgtcgagaaagcggccgaactcggattgccgaagttccgagtcaagcagctcgccaaccattactttggccatttcgatgtgaatgccgccgaattcactgattttccggcagccaagcgcagcgaggccgccgccgcgtttttcccgcagctcatcaccgaggtgacccgccaagtggcggacgaaggcaccaccatcaagaccttgtggaagctgttcgacggctccctcatcgaatcggtgcttatgcgatacccgacccgcaccacgctgtgcatctcctcgcaggtcggctgcggcatggactgcccgttctgcgccaccggcaagcttggcctgacccgtaacatgtccaccggtgaaataatcgaacaggtgcgtgtggccgccaagatgatgcgcgacggcgaagtggccgggggagagggccgcctgagcaacatcgtgttcatgggcatgggcgagccgatgggcaactacaactccgtgctgtccgccgtacgacagatttccgccatgcctcccgaaggcttcggcatttccgcgcgcaacatcaccgtatccacggtgggcgtggtccccggcatcaagaagctcactgccgaaggcattcccgtgcgtctggccgtttccctgcatgcccccagcgacgaactgcgtgacgagctggtgccgatgaacaagcgtttcaataccaagcaggtgttggatgccgcgcacgattattggctggcctccaagcgccgcgtcagtatcgaatacgcgttgatgcgcggcatcaacgaccaggccgagcatgcgcagttgctggccaagaggcttaaccattacggcgacaactgggcccacgtcaacccgattccgctcaaccccatcgagggctcgaagtggaccgcctccaagccggaagacgaacagcggttcctggagatcctgcaccgcgcgggcatcaccgccacactgcgtgacacccgcggtcaggatattgacggcgcctgcggccagctcgctgccaaggagcggtagctacttcagcgcatccttgattgcgcccacgaagtagtccagatcgtcgggcttgcgggacgtgatgagcttgaagccgttggcgtcgtccacgtgcagctgctcgtcgacgtaatggccgcccgcgttctcgatatcagcggcgatatagcggcagggcgcggcggtcttgccagccaccagacccgcgttgaccagcagccacgcgccatggcagatcgcggcgatcggcttaccttcgtgcgcgaactcctgcgccagcgtgatcgcatcctcattgacgcggatacgatccacattgcaggtgccgccgggcaccaccagcaggtcgtagtcggcagcctgcacgtcggacaggcgcgcgtccggggtcagcgtttcaccttcgtagcggtcgtgctgcaccgtctcacacgggtccaaggtagtggcggcaagcgtcaccttggcgccggcggccttgagatcgcgcagcgggcgcgtcagctcggtctcctcgataccccagttgttgacgatgatcagtaccttgctgttttcgacagccatgccaatctccttgattcggcggacaacttccacgagccattctctcacgccgagcggctgccataccggtgctcaatatgagataacgcccgattttttgcgcactttcggattccgggtctgacgtaagagggcatggcccgcgtcctgtgtacgattttcattcgccaaaacaaaaaaccgcgattggaagccaggagacggaaccatgcccgagaacatcatacagatcgaccagaacctgctcgagaccaggctcgaccgcttggtcgccgaaaaggtcgccgagctattgaacgcgatgctcgacgccgaggccgacgagatcgccaacgccgccaagtacgagcgcaccggggagcggaaggcgtacagggccggccactacgaccggagcctgaccgccaaggccggcaggctcgcgttgaaggtgcccaaactcaagggcgcggtcttcgagtccgcggtcatcgaacgataccggagacgcgaggagagtgtcgaggaggccctcatcgacatgtacctggccggcgtgagcacccggcaggtggacgacatcagccaattgctgtggggcgacaggatgccgtcccagaccctgagcgacaagctcaagaaggtgtacggggagatcgaggcgtggcgcacgaggccgttggaggacgagtacccgtacgtgttcatggacggcgtgtggcacaagcgttcatggggcgggcacgtggagaacgtcagcgtcctggtcgccatcggagtcaacgcggaggggcaccgcgaggtgatcggcgtggccgagggcatgaaggaggacagggacagctgggagcagttcgtccgctccatgatcgaacgcggcctgaagggcgtgcgcctggtggtcggcgaccggtgcgccggactcgtcgccacggtcggctcgatgctgcccaaggcgagataccagcggtgcatggtgcatttcatgcgcaacgtgctctcgaagacgccgccgacacaccgcgaatgggcgtccgccgccctcaaggccatattcgccatggaatcccgggaatccgccctggccaaggccgaacaggtcgccacggagatggaatccaggaggctcaaggccgccgcgaactgcctgcgcgagggcgtcggcgagacgacgacctacctgctggacgagttcccggacgggcaccgcaggaggatccgcacgaacaacatgatcgagcggctgaacagggagatccgccggcgcacgcgcgtggtgggcggcttccccgacgggaacagcgcgttgatgctcatatgcgcccgcatccgtcacgtcaccgcgaacgaatggtcgacccgccgctatctcgacatgtcccggctcggtgacaacctcgtggaagcgaactgactatcgcgccatggacggccacgatccaaagtgcgcaacttttcgggcactaccgctattgttggactcgtcttgagacttctgctgtgcctcttggtcggccttctgctgagcctcttcctgagcttgcttggcggcatctgcctgctgcttggcctgcatcgaggcggtgacgtcggactcggccttctgcagtttagaaatcgcattattgacgtcggattcggacggactggtcccgttcatcaccgtattggcctcggtgatggcgttttgcagcgcggtgcgggtgttttcatcggccacactgcccgcggaattatccagcgtgccctgcgcctgcgaaatagccgagctcaggttcgatttcagtgtgttggtatcggccgtcgcctttgaagtattaacggccttgatcgcgttgttgatggcatccgtcttgtcagccatgtcgctggcatcattctgcagctctttagtgtgagacttcaactcagtggcgttgaggctggaatcgcacttggcggtgtcagccggattgccggcgtcttgcaacgcctgatttagcgtggtgagcgtattggcatcggccacatcgctggtggatgtttgcgcgctggtttggccattggatatggcggtggtgagcttcttctgagcattcgtgtactgcttggccgctaccttgcactcggccaatgccacggcttggctcgccttgctgctgttggaatgccaccagagcaggccggcgacaaccagcgctatcacggcgactactgctacggcaatgccgacgatcttgctggtgttctttttgccgctaccgccgtgacgaggctcggcgccatcggaatcgtcctcatcggagacctgatccaacggaatggagggaggcatcacagcaggctgagcctgtgccgaagcggccagggcggccggttggaacacctgtgtggctgcagcatcatcggcagacgctacttgcgttgccggcatggcaacggtctcaccggatacggtggatgatgcgccgtatgcctgtgcggccgcggtttcggcattcggcatggcctgagcttcgaaaggctgtgttgccatgacctgatcaggctggaacgcttgtgttgcctcggcatctaccgcaggctgctcggcctgattggggtggaacgcctgtgtcgcggcgtttgaagctaccgaaacaggcgatgtcgccggtgccgctggtgcggctggtgctgctggcgtcaccggcgctgtcggttccaccgggcggaagctttgcgtcgtctgatcccaaacgtattgctgctggccgggcgcagcggcgattggtgtttcggatactactggctgcgtggctgccgccggctgtggtgcttgtgcggcaaccgcagccaggaattgcggcgagaacggttgcgtcatggccggatcgatgggctgcgtcggctgagcggcttgtacggtcggcacagcttgcgtgggttgtgaggcatacgctacttgcgcgggctgcacaaactgtgtgggctgtgtgggctgcgcagactgcgcagactgcacagactgcgggaactgcagagccggtgtggcttgtgccgtgggttctgtgctatatgctgccgtctcttgcccgggaatcggaggaaccgttggcctgaccggcttttcgggctgctggaagtcgaactggaacccgccatcgctgttggtcatgacatctccttgggattaagcaaatggccggcatccgccggccgaatggtacgtcgcaacgctcagtcgtcgatgtgcgcgcggtagaaattctcgtaggaacggctcggcgtcggaccccgctggccctgataatgcgagccggtgcctttggagccataagggtgctcagcgggcgagctcagctggaagaagcacatctggccgattttcatgccaggccatagtttgaccggcaacgtcgacacattagacagctcaagcgtaatatgcccctcgaaaccggggtcaatgaagcccgcagtcgaatgggtgagaatccccaatcggcccagtgagctcttgccttccagacgggcggcaatggacgggtccaacttgacgtattcccacgtggaacccagtgcgaactcgccagggtgcaaaatccacggttcgtcgggagccacctcgaactgttcggtgagcgcgccttggttttccgccggatcgacataggtgtaggcgtggttattgaacaaacggaagtaccgatccaatcgcacgtcgatggaagcgggctgcaccatttcgggggtccacggatcaagtgagatatgacctgcggactgtgcggcgagaatgtcgcggtcggacagcagcatgtgaaaaactccttgggcaaataaatactgccttcaagtctagcgccttgggcggaaacgtgagaggctcctcacgcttccgcggtccatcaatcgcaagtattctcaggtttttctcagagaaacttagaggtagacccagaaagcagtggttatataaaagatgtcagcggaaagctgatcaggagccgcagcagttcccgacaattgaaccccctttcttcttctctctcctttctctccccggcgggcaaccgccggggttctttttgtgccctgaatcattcccccgaatgaccgccattcccaagccatagcggtacactagctgtgtaatcggcaggaagggggcaccgatggcccgcaacgatgaggactacgatttcttcggcgatggtcagtatgacgattcgcgcagctcacgtcgtgcacagaatcgacgcccatccaggcgggatgccggccggcgattcgccgctacaaaagccagcagcccaacgtcgatattgtgccgcagacttgccgttgtcagcggactgctagccgtcgtggtatcggccacctcggcggttcatgagatcgcgccttacgccatttcctttatgacggcagtgccaggacgatacattgcgttgacggcggcggtgcttatcggcatcaccctgattctggtcatcgctgcgcgagtcaccatgcctcggtacgccactcacgggggagtgggcgcgggcggcatcatcgcactggtgtgcgccatagtttgcttggttatcggcgtggccgtgggcgtattgttcccggaaggactgattcagcagtcgaacgacaaggcacccgtcgaagataccgcacagatggagcaaggcatcgaacaagctgccggcgcgtgcaaagaaggatggcaggggcttgatacgggcggtttgccgggcatcaccaccgtacagatgtgcactgatccgagagtggccttcgtatcctttgaatcggaatcgtccgcagccatcagccgggcacctatcgaaagcaagatttccgaactgctgagccaatacgctgataatgagcaaacgaaaggtgattggcgattgctgaacggcaaacgctggatggtgttcggcgaggccagcaagatgaccgcactgcagcagcagtggggcggcgaacttgagacaatcaccgcagccgcagataccgcagacagcggtaacgcctgacagattgccggtatcccttgaaaagtcccaaggcgattcggcgcggattacccaatgtgattgaaatcatggtccatcgttttccgcacagcgcgcaagacctctatattggaatggtatgagcaaagaagcgaatgccagccagcctctgatcggccgcgaatccaccactgtgcccggacgttttggcgagccactcaccgtggaacacagcgtcacctcgcgcggcggcttcgaccagcatgccacgcatccgctgttcctgtgcctgcatggatggggatccagcgaagaagacatggcggacatcatgcgcctcatcgctccatataacgacttcgtggcactgcgcgggccgctgacactcgcgccggcccgtgaaggcagtcccgaccccggcaactacgcgtggtttcacgatgccctgcctatcggcgatgatcgtgactacgacgcgtatgccgccgccacagcagtcgaccgatgggtggccgacaacattcccgccgaccgtgacgtggtgccgcttgggttttcgcaaggtgggctggtcgccgtgcatttgttgcgtatcaatcccgagcggtaccgggccgtcgtctccctgtccggcttcaacgcacccggtcaggtgcccggcacggcccccgccgactctcgcctggccgattacgatatccccgtgttctatacgtacggcaagaacgatggcgtaatcccaaaatacgaactgttcgccaccgccgcttggctggaagagcatacgtggctgaaaaccaagagctaccacggtctggatcacaatgtgagtcttgaggagttcgccgatttgcgccagtggctacttgacaacgacattacttctggcgtgctgtagtcagccgccattactggaattggcgcggccgtcgcagcaatcggacatcgagggcgcttgtggctgactcggtcatagactgttctcccatgagcgaagtgagcactgcaagcactactgcacatactgaagagaatcatgtggacgagtccccgcgcggcatcgcggttatggttgtggtgggcgtgttggtcgggctgttgtccggactgtttggcattggcggcggcaccatcatcgtgcccgcgctggtctggctcggcctgacccagcggcatgcggccgccacttcgatgttggcgattgtgcccacctcggtgtctggtgttctggcctatgcggttgaaggcaatgtggattggattgccgcgctgctgatgttcctgggcatgttcatcggcggtcagattggttcgctgctgttgtcccgactgccggaagtcgtgctgcgctgggcgttcgtggtgtttatggcgtttatcatcgcgagccagcttatttttataccttcgcgtgattcgtcaatcgaatttaatctggttactgtcttgctgatgattgttttcggcgtgctcgccggtattttggctggcttgctgggtgtgggcggcggcgcgatttgcgtgccggctttgtcgatcctgtttggcgcgtccgatttgatcgcgcgtggtacttcgctgttgtccatgttcccgaatgccatgaccaccaccgtggccaatgtgcgccgcaaaatggtgcatgccaaagccggtctgattatcggcatcgtggcggcactgaccgcaccgctgggcacttggattgccggggccatgagcccgcgtgccggcggaatactcttcgcaacctatctgacggttctgctgattcgcagcatctgggtagccctcaaagtcacacggaaatagcaatccccaacttggctcccctcagagaagggagcaagggaaactagatgccggaatcagcgtccacttgcataacgtagatgttgcgcctcagggagcgggcttgggctcggttgatgtcgccggcttcgtacatgtcctgaatcataccgagttcgataccgtagctctcgcgctttacgtcctcgacctgcgtgatggtttccgtagtgccgctcatggtcggacgtgcctgcaatgaagcctcggcacgacgataatccagcaacagtgccgaacaatgctcggtgttgtacgtatcctggcccatctcgtcaataagccgaccgataacatgatgaatcgcctcgacctgcagttcgcgggtgcgcgcgaaaatctggtcctcgctcaccaatggtgtggtgtggcgaatcttggacaccgtgcgtttggcgtaattgctcatctgccgctggaacatgcgtaagcgaccgcgaatctgcgataccgcatgccccgaagtcggatcagtggaagtgtgacgcagcgtattcataatctggtcaagcatgcgctcgcaggcttcgacgttcagctcttgcgtggccgtatccgccgccggatgcgccttggtgtcggcaagtcggtcgcgcacgaattccttttcccaatgcagcgcttcgatctgcaattgctcgaatccctgaggatcggtatcgccgatgcgctgctgcaatcgtccgatgcgcttggtgtattggtcgattaccatcagaatcgcacgacgattctctggcgtgatgcgtccggtcaattcctccaccgtggcgcgtaacacatcgatggtcaccggaatcatttccgcgctgggatccttgccacggttcggggccaatagcggtaacaggaagttggccagcagcaaggtcacgataatcacgcctgacgcaatgaaaatcagctcgtcacgcatcgggaacggcgcaccgccggcaatgtaatacgggatggtaaacatcaatgacagcgtgatggttcccttggggccgccaaaggtcatcactgcggccgagcgccagcgttcgggtgtcattttgcggcgctggccggagattgtatctcgcgcaacgcgcagcatggccgcaatccagaagaatcgaagcgcgattaccaccagagtgaccagcagaataatgccgatcagcgcgatattgctgatatacgggtcagaccagctggccatcatggcgcgcggcagctgcatgcccagaagaatgaacaccgcaccgttgagcgagaaactcagcacaccccatactgaagtggaaacgatattcgtgcgtgccacattcggccccacgccggtgcggtcgaatcggatgaacaggccagcggccaccaccgacagaatgccggacacattgaattcctccgcgcccaaatacagcaggaagggcaggaacagttccatcagaatacgtgtggtagtggtttcccagccgagggatcgcacggtctcgaatagccagttggccgctgctgctatcaccaggccaaataaggtgccgccaaagaaggagatcacgaattcgccggcggcctgccccacggcgaattctccagtgaaggcggcggccagagcgaactggaagccgacgatgccggaagcgtcattgaagagtgattcgcctttcagcacgctgcgctgacgctgcgtcagcgaggcttctttaccgagggagctgacggccaccgcatcggtcgggccgagtgccgcgccgagtgctaaggctgaggctaaggtgatggacggccagacggcatgcaaagtgaatccgaccgccgccatcgtgacgatagccagtccgatagccagcgataggctcagatccagcgttttcagcaacgccgacttatcgatttcgtgggcttccaaatacagcaatggcgcgataaacagcaccatgaacagttccgggtcgagcgttgcatccgggaaaaacggcagatacgtaaccagcacgcccagcacaatctggaccagcggcgtggagactttgggcacgaagcgactgacaaacgagctcaccaccaccgccgcaatgatgcataggatgagctcaaataccgccatgttgccgccttctcccttaaatttttctccaccaaaagtatatgggaaccatgaagaaaacgttaagattgcggccgattatgcacatcatgagacgatatgagaaaaaggcatacactcgttggtatggaatatgacgaggcgatgcgccgcgcactggaactggccggtcaggccgcagccgctggtgacgtaccggttggtgcggtggtgctggatgcggccggccagattgtcgggcgcggatacaacacgcgtgaggctgatggcgacccgcttgcccacgccgaaatcatcgccatgcgtcaggcggcccaagccttgggcgcttggaatctcgccgattgcacgctggccgtcacacttgagccgtgcccgatgtgcgcgggtgcctgcatccagacccatatcggcaccatcgcgttcggtgcctgggatcccaagctcggtgcatgcggttcgatttgggatattccgcgcgatccgcatatcggccatagtcctgaagtgcacggcggcgtgctggaaggcgagtgtcagtccatcctgactgatttcttcgcccagcggcgatagacacggacgcattacttacctcacgcaaccaacacgcggcaccaaggcaacatattccatttcttctaccatcgaaaccagtagtgcaatgcaaatccacacacgtcgaaggagacaatatggccgagaacacctccactttcaccggcgccgccgctgacggcaccgcactcaccgccgtctacctgacccagcccgccgccaatgtggcgatcggtctggtgtttgccggcagcgacctgccgcacatcgtccactggggccgcccgctggccaagcccgacaccctgctggccgcctatgacgccctgaagccgcagcgcgtgtccggcgcgctcgacgacaccgcctggccgtctatcctgcccacccaggccgaaagctggatcggcgagcagcgcgtggtgctgcgccgcgccggcgtcgagctcttccccaagttcaccgtgaccaatatcgaggccggcggcgtgctggaagccaccctcgatgccgtgtccggcgaaagctacaccgatgtggccggccatgcccgtgccaccggtccggtccgcgtgcccggcgtcatagtcaccgcgcgcgatgaggagcagggcgtggaagtcgaatggcacctcgaactgctccccggcggcctggtccgtcagaaggccaccgtaaccaacctgttcggtgcagacgccggagccccgctcgagatcggcaagatcgagctcggcttcccgctgcccgaatccgccggcgaaatcctcaccaccaccggtcaccatctacgtgaacgcagtccgcagcgccagccgctgaccgtcggccgtttcgaaaagccgcagctcgccggccgccctgacttcgacgcatccctgctcctgaccgccggcgtgcccggtttcggcttcgagcatggcgacgcctattcggtgcacgtgggctggagcggcaactccgtgctgtccgccgaacgtctgccctacacaaccggcgtgatcggcggcggcgaactcctgttcggcggcgaagtgacgctcgctggccctggcgaaggccagaactcctacgacaccccgtggctgttcggctcctatggcgatggtctcaacgagatcgccgcccgattccactcctacgtgcgctccctgcacccgcgcctgttctcgcacggccgtccggtgatcctcaacacatgggaagccgtgtacttcgaccacaacttcgatacgctgaaggcgctcgccgacaaggccgccgactccggcgtggaacgattcgtggtggacgacggctggttcggttcccgccgcgacgacacctccggcctcggtgactggcagattgcgcaggacgtctggcccgatggcccgaagtccctgaaggcgctcgccgactacgtgcacgccaagggtatggaattcggcttgtggttcgagccggaaatggtcaaccccgattccgatgtggcccgtaaccaccctgattggattctctcgcccaccgctggccgactgccgctgcagggccgcactcagcaggtgctcgatctgaccaatccggatgcgttcgactacatctacggctgcatggaccagcttgtcggcgagcttggtatcgactacatcaagtgggaccacaacaagctcgtcaccgagcccggttcccgccgctccggccgcccggccgtgcacgcgcagacccttgccgtctacaacatcttcaagggcctcaagaccgcacatccgggccttgagatcgaaagctgctcctctggtggcggccgcgtggatcttggcatcctggagcacgccgatcgtatctgggtctccgactgcgtggacccggtcgagcgcgcggacatccagcgctacacctcgctgctggtgccgccggcgatgatgggcgagcacgtgggcgccagccccgcacactccacccagcgcgccaccagccaggaactgcgcatggccatggcgttcttcggtcacatgggcatcgaatggaacctgttgaaggagccggacgaggcgctcgccaagctggccgtgtgggtggccgaattcaagaagcaccgcgactggttcgccatcgacacctgcgtgcacgccgactccaacgatccggccgtgcgtctggacggtatggtgatgccgaaccgtgacgccgccatctaccgcttcacccagctgaccaccagccagacctatccggccgcgcccgtgcatctgcccggacttgaccccgagcgcacctaccgtgtcagcccgcttgacccgagcttggatttgaccggtctgaccaacggccagagcactctcggctggtggaacgaggaaggcgtagtcctgaccggcgaagccctgcagcgctacggcattcgtcccccgtccctccacccccagcaggcagtattgctcaaggctgtggcgttaagctgacagcctagtaggctgtcagtagccacggcctgagcgaagcgacagctgagcgaaggtgggattgagccttgccgataggcaagtccgtaattgctggtcgtggcggagtaactgtggcgaagcaacgttcttggctcccctctctgaggggagccaagaacggcctacccaatatgcttcacaatcacgcgactggcggcggctttggcccagagctgccagtcgtggttcataatcgtgaacttgaccggctgggtctggctgtgacggtagaaacgaatgccgtcacgtagcgaatcggtgccgagcttggccaaaaacgcggactccccggcaatcatcacatgcccgggcatcgcgatattcgccaccgtagccaccagcgaacccaaccggaaacacgtccggttcaccaactgcgtggcctgcggcacgcgttccttggcatcgcgcgcaaagtcctcaaaactgaccgcgcgacccacaatcgcagagtactgttcggcgattgaatcgtcagtcaagcattgtgaacagccgatatgtccgctggtgcagcgcggcccctccggatcgataagcacgtggcccaccagaccatagctcttatccgggtactgcactggcttgccgttcacggccagcgaataaccaacacccacgccgatggtcaccacggcgaacatatccacgccgacacccggcccgaaccaggaggcatccaccagcagagaatcgatatcattgaacaccccgcacggcaggccggtcgcctctgtgaccatcgtccccaagtccgtggccccgtcccaatgcaggaacggcgcgaacgtcacaatcgaatcgtcgaccacatgcccacctaccgcaacgcccaccgcagtgggggagggtagtccggaagaggcgatatcggcggaacattcgcgcaccagccgcgtgatggccgacaccacatactcagccgattgatccgccccgatcggcacctcgtgccggccggacaccacctcgccatgcgcgttcaccgcagcggccacaatcgacatcccatgaaccttgacaccaatgaaggtgcgtgcgttcgaacacaacaccagcgaagtctgcgggcgtccgcgacgatccgaactttcccttggcgtgaatcgctcgggcagcttgcctgacgggccggcctcggccggaagctcctcgatcaccccggcgtagatcagatcgctggtgatgcgggacaaggccccttggctcagtcccagcatctgtgccaacgtagtgcgggctatcggcccgtattgggcaattgccgccgccacgcgatgcgtatgctcggatccggaaaaccactgtggaatcgcgttggcatcagacatgcaagccccttcgctgtatttattgcgttaatcacaaaataccgcgctttttgttgcttgcgcaagtgggctcgctggcgctgggaatgaaatggccgaaccgttaccttagaaagtggaagaaccgccggcaccgaagccggaggaaaagaaagataaaggagtcaacaattatgctgtccgattccccacatgcaacgcctagactgaagcgtctggccgtgcgcaccgccgccgtggtgtgcgcgatcgccgtcggcttcggcctggcaggctgcggctccagcaccgcaggcaccgtcacgctggatttcttccagttcaagtccgaggccgccgaccagttcaagtccatggtcgccgactttgagaaacagaacccgaccatcaaggtcaacatcaacaactccgccaacgcccagaccgatctgcgcacccgtttcgtcaagaatcgtgtgccggacgtgatcaccttcaacggcgacatcagcttcggcaacttcgccgcctccggtgtgttctacgacttcaccgacgaacccatcgtggacaccctcaaccccggcatggtgcagattgccaagaatctggtgcagaccaccgattcctccaagaagcgcctgtacggcctgcccttcgcgggtaacgcctccggctacatctacaacaaggctctgttccgcaaggttggccttgacccggagaatccgccgaccacctggagcgagttcaccgatatgctcaacaccttcaaggacgccggcatcaacccgctgcagggttccgtggccgacgcctggaccacccaggcaccgctcgcctccctggccggcacgctggttcccgaatcgaagtacaccgagctcaagcaaggcaagaccacgttccaggaagtgtggaagacctcagtcgagaaggaatccgagctcttcacctactccactgcggacaccggcgtcacctaccagcagggcacgcagaacttcgcccaaggcaaggccgcaatcatcccgctcggcacctacgccatcccgcagatcctgctgatcaaccccgatatcgaacttggtttcgcccagatgccggccaccgatgacgccagcgagcagatcctcaccgccggcgacgacgtgatgctcaccatcggtgcgaacaccaagcaccccaaggaagcgatgaagctcgtcgagttcctcatgcagaaggatcagcttgacgcctacgccgacgcccagtccgccatcacgccgctgaaggacacctacttcggcaacgatgcgctggaaaccgtgcgcccgttcttcgaggaaaaccgactggccgacttctgcgaccactacattccttcgtccatcaacatcggcggctacctgcagaccatggtgacctccggcaacaccgaccgcttcctgaaccagatgcagaccgaatgggacaaggtccaagccaggaccttcgagtgatcggtaggagaggagaacatcatgtcacacgcaaccgcaaccaagaccgctgccaagaaaccggccaagaagaaggtctccgccttctccacccgcaaagtggaccccgcctactactggatggtggttccggcggccatcatcttcgccttcttcctgtacctgccatttcttgatggcgtaaagtattccttcaccaactcgcagggctacggcgattacaagttcatcggactgaagaactacatcgccctcttccaggacaaccgagtgggccatgcctacctgttcacgttcctcatcgccattctcatcacggtgctgattaatgtgatcgccctgttcctgtcggtgctgctgaactcgaagatcgccttcaagaatggcttccgagccatcttcttcatcccctacaccctctccgtgctggtcatcggctacgtgttcaagtacatcttcatgaacccgctgcccgagctcggcaaggcgctgggcatcaagtggctgtccacctcgctgttgaccaatgagcaactcagctggatcccgatcgtcttcctcgccgtctggcagggcatcgcctactcggtgctcatctacctcgccggcctgcagaccatcgacgatgaaatctacgaggccgccgccatcgacggcgtcaatgcctggcagaagttctggaagatcaccttcccgctgatcggaccgttcttcaccatcaacctcgtgctgtccatgaagaacgcgctcggcaccttcgaccaggtcgtcgccttgaccgagggcggcccgaactcctccaccgaaaccgtcacctacctcatctggaagggtggcctgaccggtggcgagtacgcctaccagaccgcaaacgccgtgctcttcttcatcgtgctggcgatcatcgccttcgtgcagctgcgcatctcccgcagccaggaacagatctgatttaggggaggataagaaatgactactgcaacagttaccccgtccaagtccggcaagcccgccaagttccgcagagaccacaagatcaactggtggctgaccgccgccgtggccgtgctgagcctgaccattctgatcccgctctacttcaccatcgtcaccgcgctgaagaccccggccgaagccggcaccttcgccctgcccacctcgtggcagtggcataacttcgccgacgcctccgccaaggtcaactacccgaaggccgcgctcaactccgcgatcatcacggtggccgccgtggtgctcaccctgctgaccaacaccttcgtggcctacgccgtggcccgcaacatggacaagcgcttcttccgcttcctgtactacttcttcatcgccgccatgttcgtgccgttcccggtcgtcatgctgccgattgcgaagcagatgggctccctgcacctggacaaccaggtcggcctgatcattctgtacacggtgctcggcctgggcacgaacctgttcatcgccaccggcttcatccgttcgattccggtatcgctggaagaggcggcccgcatcgatggcgcatccacctggcgcatcttctggaccatcatcttcccgctgatgagcccgattaacgccaccatcgccatcctgaccgcgctgtgggcctggaacgacttcctcctgccgttgatcatcctgaccgaccagtcgaaccagaccatcccgctcgcccagtacgtcttcagctcgcagttcgccaccaactacccgatggccttctccagctacctgatggccatggccccgatcctcatcgtctacatcttcgcccaaaagtgggtcgtcggtggtgtgatgaggggagcggtgaagtaaaacagcgcaggcgctgctttacttcaccgcgtcgagcgagacgagccgattaaggaaacagccccgtgggctgtttcccggcccgggcggccggataggtcgcgtactcgcgaggtcatgttgggtctggccgtaggccagtcctgaattgcaggactctgtgaagtaaaggtccgcttccacccaagcctcctccggctctcaccggaggaggctcttctgtcctgttgccatactggaaaccgccacaataaaggcgacggtcggttgatgtggcggtggcgcacaaaggtcatgtggttttgctcgttgtgcgaatgaaaaagtgacgaaaccgtacggcttacggtgcaattgaacgcatctgctgtgtcgccgtgccactggcttgtcccggtccacatatcaaccgtttgacgcgcgaaccgggacagaatccgctgtcccggttcgcggtttcgggcgattttcacgaaccgggacaattttcattgtcccggtatgaatgtcaatcgttttatgtgaaaaccgggacaacatgttgattccgggatcggctctattccgccgattttgtattacggagcatatgacctgcggagattggcttgtccctgtttgtaaaaaaggacaaaaatcgcgaaccgggacagcggattctgtcccggttcagacggcaatcgattgacatacgaaccgggccaacgccgaagtccggagcggttcccgaggcggggtttgcttgaaatccggtgtgccagcgaaatccccaccagattcccgcaggcgtgtcaactaaatcatctatccccgcaccagtgggttcaagcagacaatccaagcgcgcccgaagttgctcttgcgcgtcgcaatcagaagaaccgttaatatgtgagctgccgcgggtcaggtagattatggtggcgaagtggcggcggaacaagcgggcgagctccttcataggttcgagcctcgagtgcatcatccacgagcacaggcgatatagccacacccacgcctcgaacaggagcatgaaccctctgccgggctcgaagccgatcgtgatgtgcggctcccgcccgtcgccgtcggcgtcacggaagtccgcagacccgaccctccaaggcgaccgcagccgaagcgcggcggtgaacaggtgagaggcatccatgcctccaacctacccgaccaacatcaccccacggcacagtcacccaccacaaacagcgaaagggcccatatgttgctaaatagcatgtgcagcttatgagaattgagccgtagcagtgccttccggctctttgcagtttttgtttccggcacaccaacgcagttccccaatggaaatgtaattcagcgctttttagactatgagcaacaggcaatgtagaccataaataatggaggagccaacgatgaccacttcacaacgcacagtaattccagattccatccgcaccaacggtgccaccccaaatccgtggtggtccaatgcggtcgtttaccagatttacccgcgttccttccaagacaccaacggcgacggcctcggcgatctcaagggcattacgtcacggctcgactatctggccgacctcggcgtggatgtgctgtggctatccccggtatacaagtctccgcaagacgataatggctacgatatttccgactatcaggacattgatcctctgttcggcacactcgacgacatggatgagctgctggccgaggcccacaagcgcgggctcaagatcgtgatggatcttgttgtcaatcacacttccgatgaacacgcctggtttgaagcgtccaaaaacaaggatgatgagcacgccgactggtattggtggcgtcccgcccgtcccggcaccactgccggcgagcccggtgccgagcccaaccagtggggctcctactttggcggttctgcatgggagtattgccctgagcgtggcgaatactacctgcatcagttctcgaagaagcagccggacctcaactgggaaaatccggctgtgcgccgcgcggtatacgacatgatgaactggtggcttgaccgcggcgttgacggcttccgcatggatgtgattacgctgatttccaagcgcacggacctgtctggcaagctgcccggcgagtacggttccgagctggacgatctgcccgtgggtgaggaaggctattccaacccgaatccgttctgcgcggacggccctcgccaagacgaattcctggccgaaatgcgccgtgaagtgttcgaaggccgtgagggcttcctcaccgtgggcgaggctcccggcgttaccgcacagcgcaacgaatacatcaccgaccccgccaacggcgagctggacatgctcttcctattcgagcacgttgattttgactgcgaaggcgtcaaatggaagccactgccacttgacctgccgaagctcaagagcattatggccggttatcaagcggccgtgaagaatgcaggctgggcaagcctgtttactggtaaccacgaccagcctcgcgtcgtttctcgttggggtgatgactcctcggaggaatctcgtgtgcgttcggccaaggcacttggcctgatgctgcacatgcatcgcggcaccccgtacatatatcagggcgaagagctaggcatgaccgacgcccacttcacgcgcctagaccagtaccgtgacctcgagtccctgaacgcttaccgtcaaagggttgaggaagccaaagtgcagtcgcccgaatcgatgttggcgggtatcgccgcgcgcggtcgtgataattcgcgtaccccgatgcaatgggacggctctgtctatgccggtttcactgcgccggatgccgctaaggagccatggatctccgtcaatcccaaccatgcggcgatcaacgcggtcggcgaattcgacgatccggattcggtatatgccttctacaagcagctcatcgcgctgcgccacgacatgcctgtcgtggcggccggcgactggcatctgctcgatgcggatgacgcgcatgtctacgccttcacccgcaccctcggcgatgagaagctgctggtcgtggtcaacatgtccggccgaaccgttgatctaccgcgcgaaaccgccgaactggccgccgccggaatcaccgagtcgaacgtggtaatcagcacgtatgatgccccgcacgccgtggcctccctcgccaaccgtgagctcgatccttgggaggccgccgtcattcagctgtagcgattggagcgattgtagcggattgagtacctttctccgttcacagagatacttcagggctattgcgaaatgctatccgccttgaaagaggtaccgtaacgtcaaaaccccgagtataagcgttgaaaaatcaaggcttatactcggggttttcgatgctcggtacccctgtgaaaagcagatagctgtctgcaagaggccgaatgtacctctgtgaagcgagatagctggtgtctctcggcattgtggtgcttacaatggaaagctatggaacaaaaggatgttttgaaggcgctgcaacgtgatcatgcagccgaactgaagctggccgccgaacgactcaaaggcactgcccgccacacggagatcattccttctccggtgctgagcgagatgaccggccatgagattctcctgaagccggaaaacctgcaggtcaccggatccttcaagatccgcggtgcctataacaagattgcttcgctcaccgaagagcagatcgctcacggcatcgtcaccgcgtctgccggcaaccatgcccagggtgtggcctatgcggcccgcgagcgtggagccaaggccaccatctgcatgccgcagatcaccccgccgctgaaggtcgatgccaccaaggcctacggtgccgacgtggtgctgtacggcgatgtgttcgatgaatccgccgcccacgctgctgagctcgccgacaaggaaggcatgatttacgtgccgccattcgacgattacgaagtcatctgcggccaaggcaccatcggtctggagatccttgaagacgtgccgaacgtcactgacgtggtcgtgccgctcggtggtggtggcctgggtgccggcgtggcgctcgccatcaagacattcaagcctgaagtgcgcgtaatcggtgcgattccggagggctcaccggcctggaaggactcgctggccgcgggtcgtgtgtctccggctgaccatgtggttacctccgccgaaggtgttgcggtcaagcaccccggcgacctgcccttcgctctgattaacgagttcctggacgatctggtcaccgtcaccgagcgcgacatcaacgaaatgattctgctcatgctcgagaagcataagctggtggtcgaggcggccggcgccgtttcgctggctgcgctggaacacctgaacctgcgttcgcgcaagttcgccgccgccaccggcccgcacgtggtggttccgattatgtccggcggcaatatcgacaccgtgaccatgggtgcggtgattcagaaaggtatgatcgcccgcggccgcatcatgaacttcgaggtcgagctgccggatactccgggccagctcgtcaaggtggccaccctgcttgccgagcagcgcgccaacgtcattcagcttgatcacgaccagttcaaggcatccggccactacaccaacgcggtgtctctcggcgtcacggtcgagaccaacggccccgagcacatcgaccgcatcctcgcggcactcagggaagccggattccagcccaagcgcatctactgattccaataccgctggcgggaagccgcgcagaagtgtgctccaatacctcccgctggcgggaggtggcgcaaaagcgccggtgggtggttaaccgacaatcatcagttgcttaacccacccaccggcgctttcgttatgctgagggctacttgttctccgcaatcgtctcgtccaccaacttcggcagggcaacggcgatatcctcatgaatcaagcggctcgcaagatggtcatattgcgtgtgacccatattcataatggtgatgggcacgcccgcctgcgcggccaccggcacaatgctcgccgccgggtacacctcaagggtcgatccgattacccatagttcgtcggctttggtggccagactgtacgacttctccatcgcgccgtccggcaacgcctcaccgaaatacaccacatcggttttgataatgccattgcacggcatatcgccacgatacttcagtttgcgatggcaatgtgggtcgggctcttcatccaaacgggccatgatgtccgccgtggcatattcctgatggcacttcatgcaatgcgaggtgccgatagtgccgtgcaggttcacgatgacgttgtcgctgttgccggccttctcatgcagcgcatcgaagttctgcgtggccagcagcgtcagcatgccggcttgttccagcttgaccagcgccttatgcgcagtgccgggctgcgcattccatactggcgattccttttgccagcgccaggagtactcgcggtcctctttgttgcgcagaaacagatcgatgtcgtaaacgctcatttggtcaggatgcttggtccacacaccgtccggaccgcggaaatcagggatgccggcggacgtggaaatgcccgccccggttaatacagcaatcttcttggtcataactacaggtatacccgcgattcatgaacgaaatccgatggcggagcgctgtcatgcgccgattgtgcgccggcagtgtggttgccgagagatgaacgcagggccgacaagctgaaaactctcgcgacacgccagccgaatagtggatttgatgcttttcagaaacatttgaggggttaacctagcctcatcagagcaaagtgggctctgtgcgacacgccgagggaaccgcgctgttatgccgattcctggggtttttgtgcgccttgatttgcgtgaatccggacatgcgtgtaagttattcacctgttgccgctcagcgcggcgggttccttcctctggttggtttcccgtctggctggtgtggtggtggtttgagaactcaagagcgtgtttgtactacttctttatagtcaatgattgccagttcattcctcgcctgattgcctgtcgtggtggttgggtacccgggagggtttgatgaggggtgaggttttttgagggcgtccttccttaaggacgtgctcgtcaatttttgttttgagagtcatctattcggatgcttttcatgaagtttttttgtggagggttcgattctggctcaggatgaacgctggcggcgtgcttaacacatgcaagtcgaacgggatccatcaggctttgcttggtggtgagagtggcgaacgggtgagtaatgcgtgaccgacctgccccatacaccggaatagctcctggaaacgggtggtaatgccggatgctccagttgatcgcatggtcttctgggaaagctttcgcggtatgggatggggtcgcgtcctatcagcttgacggcggggtaacggcccaccgtggcttcgacgggtagccggcctgagagggcgaccggccacattgggactgagatacggcccagactcctacgggaggcagcagtggggaatattgcacaatgggcgcaagcctgatgcagcgacgccgcgtgagggatggaggccttcgggttgtaaacctcttttatcggggagcaagcgagagtgagtttacccgttgaataagcaccggctaactacgtgccagcagccgcggtaatacgtagggtgcaagcgttatccggaattattgggcgtaaagggctcgtaggcggttcgtcgcgtccggtgtgaaagtccatcgcttaacggtggatccgcgccgggtacgggcgggcttgagtgcggtaggggagactggaattcccggtgtaacggtggaatgtgtagatatcgggaagaacaccaatggcgaaggcaggtctctgggccgttactgacgctgaggagcgaaagcgtggggagcgaacaggattagataccctggtagtccacgccgtaaacggtggatgctggatgtggggcccgttccacgggttccgtgtcggagctaacgcgttaagcatcccgcctggggagtacggccgcaaggctaaaactcaaagaaattgacgggggcccgcacaagcggcggagcatgcggattaattcgatgcaacgcgaagaaccttacctgggcttgacatgttcccgacggtcgtagagatacggcttcccttcggggcgggttcacaggtggtgcatggtcgtcgtcagctcgtgtcgtgagatgttgggttaagtcccgcaacgagcgcaaccctcgccccgtgttgccagcggattatgccgggaactcacgggggaccgccggggttaactcggaggaaggtggggatgacgtcagatcatcatgccccttacgtccagggcttcacgcatgctacaatggccggtacaacgggatgcgacgcggcgacgcggagcggatccctgaaaaccggtctcagttcggatcgcagtctgcaactcgactgcgtgaaggcggagtcgctagtaatcgcgaatcagcaacgtcgcggtgaatgcgttcccgggccttgtacacaccgcccgtcaagtcatgaaagtgggcagcacccgaagccggtggcctaaccccttgtgggatggagccgtctaaggtgaggctcgtgattgggactaagtcgtaacaaggtagccgtaccggaaggtgcggctggatcacctcctttctacggagaattcagtcggatgttcgtccgacggtgtgcgccccgcgcgtcgcatggtgcgatggcggcggggttgctggtgtggaagacgtcgttggctttgccctgccggtcgtgcggtgggtgcgggggtggtatggatgcgcttttgggctcccggatcgccaccccaggcttttgcctggcgcgattcgatgcccgtcgtgcctgggggccggccgtgtgccggcgcgatggcgtggcggtgcgtggtggcttgagaactggatagtggacgcgagcaaaacaagggtttttgaatctttgttttgctgttgatttcgaatcgaactctattgttcgtttcgatcgttttgtgatcatttttagtgtgatgatttgtcgtctgggaatttgctagaggaatcttgcggccatgcactttcgtggtgtgtgttgcttgcaagggcgtatggtggatgccttggcagacaggaccgatgaaggacgtttgaggctgcgatatgcctcggggagccgccaacagggctttgatccgaggatttccgaatgggggaacccaccgaccgtcatgggtcggtaccggcttcggccggggggtacgcagggaagtgaaacatctcagtacctgcaggaaaggatattccgtgagtagtggcgagcgaaagcggatgatggccaaaccttgcgcgtgtgatacccgtcgggggttgcgcgcggggtgttgcgggatcgcgtgcgccggctccgacgggccggccggcagttgcagaaaaccatgtgtcaggggaaccgggttgaataccgggccgcagagggtgagggccccgtacctgaacgcgcatggtctgccgatcgcgtctcccaagtagcacgggtcccgtggaaccccgtgcgaatccgcccagaccgttgggtaagcctgaatattcctgtctgaccgatagcgaacgagtaccgtgagggaaaggtgaaaagtaccccggggaggggagtgaaacagtctctgaaaccgtgcgcctacaatccgtcggagcccttttgtggggtgacggcgtgcctatcgaaaaatgagtctgcgagtcagtggcatgtggcgagcataacccgtgtggggtatgcgtagcgaaggcgagtcttaaaaggcgtttgagtcgcgtgtcctggacccgaagcgggatgatctagccctgagcaggttgaagcgcgggtaagaccgcgtggaggaccgaacccacctgggttgaaaaccggggggatgacttggggctaggggtgaaaggccaatcaaattccgtgatagctggttctctccgaaatgcatttgggtgcagcgtcggggtcattacgtcccgggggtagagctactggatgcttgcgggcccgtatcgggtaccaacagcaaccaaactccgaataccggtgacgcgtatcccggcagtgagtcggcgggggataagcttcgtcgtcgaaagggaaacagcccagaccgtcgtctaaggtcccgaagcgtgtgctaagtgggaaaggatgtggagtcgcatagacagccaggaggttggctcagaagcagccacccttgaaagagtgcgtaacagctcactggtctagtggttccgcgccgacaatgtagcggggctcaagcacaccaccgaagacgcggcagtattttgtactgggtaggagagcgtcccatgaggggcgaagcggccgtgtgaacgcgccgtggacttcatgggagtgagaatgcagacatgagtagcgagagacgggtgaagatcccgtccgctggatgaccaagggttccagggccacgttcatcgtccctgggtgagtcgggtcctaaggcgaggccgacaggcgtagtcgaatggatgaacgggtcgatattcccgtaccggctttcagccgccaaaaccgaggcttggagtactaacctccgggtccgggcttactgctccttcgggggcgggatgccctggcctgttgggaccgatccttgtagtaggtcagcgcaggagtgacgcagaagggtagccggccgcggaggtggtcttccgtggtcaagcacgcagggcgtgggacaggcaaatccgtcccgcatgggtccgaggtgcgatgatgggggccttatggcccgatatccggtgatcccggctgccgagaaaagcttcggcgtcaggctcaaagccgcccgtaccccaaaccgacactggtggtcaggtagagaataccaaagcgatcgagcgaatcctggtcaaggaactcggcaaatcactcccgttccttcggtttaagggagacccccgatggtgaacacacttgctgtgggagcttttgggggtggcacagaccagggggtagcgactgtttaccaaaaacacaggtgcatgcgaaggcgcaagccgctgtatatgcactgacgcctgcccggtgccggaaggttaagaggatccgtcagccttcgggtgaagcggtgaatttcaagccccggtaaacggcggtggtaaactataaccatcctaaggtagcgaaattccttgtcgggtaagttccgacctgcacgaatggcgtaacgacttccccactgtctcgaccaggagctcggcgaaattgcagtacgagtaaagatgctcgttaagcgcagaaggacgaaaagaccccgggacctttactataccttggtattggcattcggtgtggattgtgtagcataggcgggaggccgagaggcgcggtcgccagaccgcgcggagccgtaaggtgaaataccgctctgttcgcattggatgtctaacctcgaacagtcatcctgttcagggacagtgcctggcgggtagtttaactggggcggttgcctcccaaagagtaacggaggcgcccaaaggtccgctcagcccggttggcaatcgggtggcgagtgcaagtgcacaagcgggcttgactgcgaggacgacggtccgagcagggacgaaagtcgggactagtgatccggtgccggtgtacggacgcggcatcgctcaacggataaaaggtaccccggggataacaggctgatcattcccaagagtccatatcgacgggatggtttggcacctcgatgtcggctcgtcgcatcctggggctggagcaggtcccaagggttcggctgttcgccgattaaagcggcacgcgagctgggttcagaacgtcgtgagacagtttggtctctatcctctgcgctcgttggaatgctgaggaggcctgcccatagtacgagaggacctgggtggacgaacctctggtatgccggttgtcacgccagtggcacggccggttggctacgttcggaagggataaccgctgaaagcatctaagcgggaagcctgctccaagataagcattccgtggaaccttcgagttcctgtagtccccatgcagaacacgtggtcgataggccggacgtggaagccccgcgaggggtggagccgaccggtactaacggacgaaaggcaacactaacattccaacccctggcggttggaccgcatcttcctcctgcaaacggcaccagacggcaatgagcattgtctggccacaagacgaaacatcgacatatccgcgtccgctgtccggttcccaggccgccacaggccggcagaccccagcgtctgaccgtataagagaagatttgcggcggccatggcccaggtgagacgcccggtcccattccgaacccggaagctaaggcctggcacggcgatggtactgcacccgacagggtgtgggagagtagcacgccgccgcaccacacgtacaggaagcccctcggagcacacgccccaaggggctttcgcatacccgaaacactcacgacccaaacccacacacccccacaaaaacacccggggcttctcgcactcatgagacccacgtccgggaccattcccggccggccccgccgtcggggccgaagagagacggcgcgtccgcgaccgtgggagcccgacgcccgggccccccggtccgccgcgcggacggctccccctcaaagaggggagccagaaacctcttgggccccgacgggatactcctgccggggcccagtgcgttttgggcggcaacccgctgaatacccggtaagatggctgaggtatcaacatacaggccaggaggtgacgcgcatggtggcgccaagccgtgatgaccgtagcgtagatgcattggtgaaatccaaggcagtacttgatgtattggcggaactgggaccaagcactgcaaaaaccataagcgaacgtactggtgaacccgtaagctcaacgtatcgtttgctggataatctcgccgcagtcggttgggtggaacgcggcatcaatcgtggcgagtatcggcttggcatcgattgcgtacgtatcggcggccaaatcgaaagcagactggacattcagcagatcgctcgccgtaccttccgcgcccatcgtggccagttcggcatctggggtctgttcgttcggaggcgattgcgcacggtgtgtatcgagacacgcacccgtgaggcattgcaaagctatgcacagctggtgggcaatagcttgcctctgagcatgagcgctccctctcatgtactgacggcctggcttcccccggctcgctacgagcagctgttggaacactatgcctataacaacgagctcggcggcacattctccacgatgcgtgccacagcaatgggacaggctcgtcatatacgtgaatgcggcttcacctatgatgtcggccagaccatggccggctccgtgactatcagcgtaccggtattcaatcacgccggagagattcaggcggcaatcgccctgagtggcctttcccgctccttggaacctgagctggcctgtctggtagatgggaaaccggcaacggcatcggctcaagacatggtgcaattggtgcagactgccggccgcgaggtgtcgcgaggccttggatacagcggtgattatcttggcctgagcagttgaatacgatgagtcagggataagtcaggggaaggaacgtcgacgatggcggaagacaaacgtgaaccgacccgcgctttagacaaggcgagtcgtgtggtggacgcattggcggcggagaatggcctgtcgccggcagatatcgccgacgcctgtgatatcccgcgatcctccgtataccgcgtgctggatggactggtcgatgtggggtgggccgtaacagatacggatggtaactactcattatcactggactggctgcgattggctgatgccgctcgcacgtctcgtaccgaatggcagcctgcgattgcggtcatgcatgccatcaccgcgcaaaccggcatgacctcattcctcagtgtggtctccggcactgaattggtatgcgtggaatgtgcgcaaggtcatgccatcgattcgctgatcctgcgcccgggccgcgtgctgcctctgcatgctggcgcggccggccgcgtggccttggcgtatttcgaggatgccgatgtcgaacgctatcttgcaggagtgccgtttccggcatataacgagaacacgctggtcagtgtggaacagttgcgcgaggatattcgcttgactcgcgaacgtggatatgcactgtcggatgaggatgtgacgttgggtgtcggtgccgtcggtgtaccgattgtggacaacgagtccggtcgcgtgatcgccagcctgtccgccggtggattcgtggacgaagtgttagccactcaagaatccttggccgcgttactgcgcgatggcgtacgcgaaattcaggcagcctgattcggcccgctaggctgtcgggctggacggttatgtccggtcagctatggcctttgccggctacggttctgctggttatgcttctgcccgactacgctgcggtccgttacgcttcggccacacgacccaacgcgatggcggtgatcagcacgtacgcctcgcgcgggtcggtggcatcccagccggtggattcggcggcacgcttcaaacggtagcggatcgtattgggatgtacgttgagctccttggccgtggtctcgagcgaaccgccgaacttcaggaatgtggagacggtgagcagcgtcggatcatcagggcctgctgctgtcaggcttccgtagaccacgcggaccagttcgtcacgggcgtccgcgtcgccgatcaacgcacgttcgggcagggcgtcgtcggtgcgtaacgggcgcggcaatggctgcacggtggcggccagggccggcgcggcctgaagacagtagagcgtggcctgaatcgaacgcatcgcgccatcggcaccggtgcgctgtggacccaaggcgattggccgatcggcggcgaacgacggggcgatggtattgcagatgatttccggcgtggccgcaccgaccggacgaatcaacgccactacggcggtgctgttgccgatcgggcgcttggcggtcagacacataccgccgaaatcggctacgattttctcgatttccttggccgtacgtgcggcggaccgggcagggtatccggcgatggtgtaacaatcgaagtcatgctcgaaaccgaggatggtgaacagggactccactcgttcgtcggccagatgattgaacaggcactcgaacagcacggtgcgtacgcggttggtcgcggtgatgccgggtgcggccgaatcggatgaatcgggcgcacccggcataccggatgcaccggacgaatcggcaacgtcggcagcaagaagttcgagaaaatctgacatagtcactagtgtagcgtcgctgattggcgttgcctttcagccaaagactctcgccaatacgtcagcaccacgaatccgaatacaaacgcaaccggcaacatgtgccgctcgaaattattggccggcgcggtgatcatcacgcccatcagcagtagcagcggaatatgggtcatgagggtgagccaacgtcggcgaatcacctcggccgcgccgatcagcaatgtcatcaccacgtagaaattgccgtgcgtaggccagccgagtacgggaataccgccccatacgcgagtgaagccggcgatgtgctcacgccagtcatggttgtaatccttgatccatgtggagtttttctgcacgtaatcgctggtcacgtaataatccatcgatacgtacggctgatcgttcacattgaagtatccgaagcatttggccagcaacgcatccagcgcgatgattggattgtccttgacgatttcgaaccatgccttgttgaaattggtcatatcctcgggcgtcaccgtgcgccacttgtagctgaccttcttggcctgaatgccggaggatttcaccgggtcggcgtcctgctgggagtaagcgtcggccatctgatcgagattgaagacgggcgcgaggttctttttggcttcgtctgaaatgccgtccggattgcgctgggccacgcgggcgatcatttgcagctgtacgccgcggctttcgattgggtcgccgccgatgatcgcgccagaggagatggcgaaggagatgccgccgtgaatcagtacggtggggatgagcagcgccacgacgtaagtcgcccagcgcttgcggtcggcgatcagagccagcacgatttgtagggcgatgatgtaccacgcatatttcgcggaaatcagcattaccgacgtggccaggataaaggcgatgaaactgtgacgcggcaagtggacgggcgtggcgatggcaggggtctgaggatgtttgcgggtgccggcggggtgccaggtctggacgagttcataccagacgctgaaccaccagacgaacgagaacgcgaacagcggcgatttggtgatggagatagtggaaaacacggccagcgggcagaccatgaagaacagcagaatcaggaatctggccaatcctccggcctgtgggggagcggcggaatccgttgccgtttttcctatccaaggccggttcaggaatcgattggcggcggcagcgcagcagaacacggcgaacagcgtctgcagggcagccaacgtcacgataccggcatcgtttgagccggtcagatgcctcgcaaacgtgaccatcgcgccatagaacacagtgagtaccacattgtgctggtcggtcagatacgtgggatcggacggccacatgtagtgcgcagtggggtagatgtccatcggcacgaaggagaagaagccgatatagggctgtttcaggccggtccactggttccaggcccagctgaattcacggatctgtgagcggaggtccgcaccgaatgcggccagcagagtggtcggcacccagagccagccgacaaaaaacaccagcataagcttccagaaccggttcgtgccgcgtgtgatccagcggtccagaacagtgacggtggacgtgacgatagcgcgaacggtacgacgggtcttggctggttggctggcctgctgatcggcggcgggccgtgatgtttcgctattccgctgatgttgacgtagtcgctcgccgatagccctcggcagtatgcgctggcctgctgcgaatcgcaccatcagcgtgatgattccgagatatatcaggaatgacacgacgaatattgcggtattggcccagttccaatgggcgagggtgccgttctcctcgtcccagtacagcgggccgaccgccgtgcacagtgcaagccacaggccggccagcacggccagtgtccagcgcgcggcagcgcccgcgcgcgcaagatgcgggtgggactggcggctggatacggcggcaagcttcgcggtggctggtgacgtcatgacaatatatggtagccgcacaggtcaacggttgatattcgatgtctgccgggcatcgccattgttcgcaagccaatatgacggccgggtgcatgcgtggggtcggcgaatgcggaatttccgaagttgtgaacgttaacatgggctatgtgggtgaaaatagttgattttgcgcgcttttccatggaataacgcgggcatatcgcgccaaaatcgaggtaacgtagtgcccatgatgattgcgttgaaagctgcaacgccgcagctacccagaactacagccgtcgcagatcatgtggtcgccgtggacgaaaccgattcgaccaacgcgctggccgtacagatgattggcgacgggtcgttgacgttgcccgaccaccaggatggcgaactggcggtggccgtggtggccgccgaccggcagaccgccggccgtgggcgcaatggtcacaagtgggtcagtcagcccggccgttgctcgacgatgtcctatgccgtgcgcattccgcgcgcgatcgccaccgacgaatccgtcaatggctggctgcagatgatcgccggactggtcacgctggacgccctgaacggcatgatcgaggaatacggtgccgcgccgaaccagccggactgctcgctggaactcaaatggccgaacgacgtgttctgccacgggctcaagctgggcgggctgctctcggaactggtgattccgccgtcgtccggtaccggtactgatgctgatgccgatgacgacgtcgtcatcgtgttcggcgtcggcctgaacctggccttgggcgcctgtcggctgcccacgccgcaatcgacctcgctgcagctgcatgtctccgggctgccgtcgttcggcgagatgcgcgatgcggtggccgaacgtcaggtcgagggcttccgcgagcggttggtgaagttcatcgccgacccgaagggccaggccgagtcgttgcgcgaggaggtgaaggcggtgtgctgggcgcgcggccgtcaggtcgaggcgcacttcacggacggcaccacgctgaccggcgaagccatcggcctcaacgaagacgcctcactgatcctgagaacacaagacggcacggaccatacggtccgcaccgccgatgtgggagtgctgtaatagccggccagtagctagctagtagctcaggtcagcgaccgagcttggacaggccggcggcggccagagaggccaccacggccttgatggcgtcgccaaccacgaagcccatggaggccagggccacggcggcgagcggcgcaccggtcagcgcggactggatgacgaagccgaaggcgtacaccaccacgacgccgccgaccagcgcggccagcaggtagcggcccgcggtgcgcgcggcggccgcgaaggacgaagtgtcggacttgccgcgcagcagggcgatgaccaccacacccggcaggaagccgaagaggaagccggcgctcgggccgaccagggccagcgtggaggtgccgccggcaaacaccggcaggccgaccgcaccggccgccagataggtggcgacggcggcgccggcctgacgccacggcagcataagaccggcgagcatcaccacgaacgtctgcagcgtgatcggcaccggcgtgcccggaatcggaatctcgccggcggccgcggacagccacatcagcacggcgaacagcaccggcttccaggatgcggcgacgatacgacgggcgagcgatgtggtggccgcagcggatgcggtggtgtgtgaagtctgcatatcaatgacccctatgttgcgtgatatcgccgtgaacggcgggcggtatgcgatggatgaggggaggttccggcgggtcgtgcggtatccccgacagtccgaaccgtccatatggtggacggtcccaaatgaatccgaccctgtgcgggcgaatcgtgcggcgatggaccgatgccggtccggtcaccttccgttcgcccgcagatgagccttcccccgaacttacggttgccatcgtagaggtgttcgatttcgtgcggtttcgtaccaatttacaaaattgtcgatttcgatttgtcataagttgacgaacacaaccgtaacgtcaatttcttgagtcggcgcgcaaggatgtgcaatcggcggatttgcaacgtttttgatagccggcgccaacggttgcgttgccggaacctacgcgcgcgtttgttcgtagcctacaaaagggcgtgaaagcttttgtgtgaacgcggcttgccctctcctctatatagagagcacaatttgacactatggcttctatcgtcaaaaaactgctgattgcgaaccgaggcgagattgcgcttcgcgtggtgcgcacggccaaggagatgggtatctccaccgtggccgtctactccgaacaggaccgcaatagccgctatgtggacatggccgacgaggcatacctgctctccggcgacacctacaaggacacgtacctcaacgaagatctgctgattgacatcctgcacaagaccggtgcgaatgccgtgcaccccggctacggattcctttccgaagtgccgagcttcgcgcagaaggtcgaggatgccggtgccatctgggtgggcccgcaccacaccgcgctggtggatttgggcgacaagattaccgcccgccgcgtggccctacgcgccaaagtgccgccagtgcccggcctgtccgaaccggtgaccgacgtgcgcacgctgctcgacttcgcacacacccacggctacccgatcatgatgaagcgcactgatggcggtggcggccacggcatcaccgtggtgcatgacgacgaggagctgcgccgcttctacatgaaccacgacgcgctgcaaggcggcgatctgaaggaatacttcatcgagaagttcgtggacaaggcacgccacgtcgagacccagtccgggcgcgactcgcacggcaacttcaccgtgtactccacccgtgactgctcgctgcagcgccgcaaccagaaactcgtggaagaggcacccgcgcccttcctgtccgaggaaatcatcagcacgctcgaggaatactcccgccgcctgttcaccacggtcggctacgtgggcctgggcacctgcgaattcatggtgaccccgaacggcaaggtgtacttcctggaagtcaacccgcgcttgcaggtggagcacaccgtctccgaagaggtcagcggcctcgacctggtgcgcgaacagctcaatatcgccgccggtggcgagctcacccgcgcccccgaactgcgcggccacagcttcgaactgcgcatcaccagcgaagacccggccaccaacctgacccccggctccggcaccttggagaagatccagtggccggccggccccggcgtgcgcatcgataccggtgtggaacagggcgacaccatctccccgaagttcgattcgatgatgggcaaggtcatcgtcaccgcccagaaccgtctcgacgccgtggcccgtgtgcgccgcgtgctcgatgagcttgtgatcgaaggcgtgcccacgccgattccgctgttcaaggaaatcttccgcaacgacgacttcaccgccgagcatggccacccgttcgctgtgtccaccaagtggctggagcgcacgtacctgaaccgcacaccggcttccgccgcctccggccagccggcctccttggccgccgccccgggtgccgctgccccggccgcgcccgacaagtccaagtcggagacgttcgtcatcgagatgaacaaccgccgcgtcaagctcaccgtgccactcgacatcgtggagaacatcaccggctcggcccgcgcccgcggtgccaagcgacccacccagccgttgcgcggtgcgggactgcacaacgtggcctccagtgccgctgcggccaacgacggcgccaaatccggcgtcatcgcctccccgatgcaggccgtggtcacgcgcatcaacgtgtccgaaggccagcaagtggccaagggcgaccttctggtggtgctcgaatccatgaagatggagaactacgtgtacgcgccggccgccggcgaagtgaagaagattttcgttggcccggccgacggcgtggaggccggcgacacgctggtcacgctggacgtgaacgccggcaaggccaaggctgctgcggctgcgccgggatctctccctcaggcggctgcgtcgacagctccctcgtcagaaggagccgataaggccaccgacgccaagaaggagggtggcaatgactgacatcatggattcgcaggccgtgaaggccgcggctgcggcctcggccgccaacgccgcccagccttcggcccaccagccgctgcgcaccgctgtggtcaaggccgccgaactggcccgcgccgccgaagagcgcgcccgcgacaagcagcacgccaaaggcaagaaaaccgcgcgcgaacgcctcgacctgctcttcgacaccggcacgttcgaggagatcggccgcttccagggcggcaatatcgccggcggcaacgccggtgcggccgtcatcaccggcttcggccaggtctacggccgcaaagtggccgtctacgcccaggacttctccgtcaagggcggcaccctcggcaccgccgaaggcgagaagatctgccgactgatggacatggccatcgacctcaaagtgccgatcgtggccatcgtggactccggcggcgcccgcatccaggagggcgtggccgccctgacccagtacggtcgcatcttccgcaagacttgcgaggccagcggcttcgtgccccagctgagcctgattctcggcccctgcgccggcggtgccgtctactgcccggccctgacggacctcatcatcatgacccgtgagaactcgaacatgttcgtcaccggaccggacgtggtcaaggcctcgaccggcgagaccatctccatggccgacctcggcggcggcgaagtgcacaaccgggtgtccggcgtggcccactacctcggcgaggacgaatccgacgccatcgactatgcgcgcaccgtgctcgcctacctgccgtccaacagcgaaagcaagccgccggtctacgcatacgccgtcacccgcgccgaacgcgagaccgccaagcgacttgccaccatcgtgcccaccaacgaacgtcagccttacgacatgctcgaagtgattcgttgcatcgtcgattacggcgaattcgtgcaggtgcaggaactgttcggcgcctccgcgctcgtcggcttcgcctgcatcgacggcaagccggttggcatcgtggcgaaccagccgaacgtgctcgccggcatcctggacgtcgactcgtccgagaaagtcgcccgattcgtacgcctgtgcgacgcgttcaacctgcccgtggtcaccctcgtggatgtgcccggctacaagcccggctccgaccaggaacacgccggcatcatccgccgcggcgccaaggtgatctacgcctacgccaacgcacaggtaccgatggtgaccgtggtgttgcgcaaggcgttcggcggcgcgtacatcgtgatgggatccaaggccatcggcgcggacctgaacttcgcgtggccctcctcccagatcgcggtgctcggcgcggccggcgcggtgaacatcatccaccgccacgacctggccaaggccaaggcctccggacaggacgtcgatgcgctgcgggccaagtacatcaaggagtacgagaccagcaccgtcaacgcgaacctgtcactggaaatcgggcagatcgacggcatgatcgaccccgaacagacccgtgaggtgattgtcgaatcgctggccacgctcgccaccaagcggcgcgtcaagcgcaccaccaaacaccacggcaaccagcccctctgatttttgaagacgtcaaccaaacacaagtaaggaaagcaatgaccaccttcttcctcaatcgcctagccaccgagccccatgcgctcgccttcgccggccagtccaccccgtggccggtagccctggcagaccagaccaccgatcccagccttgacgaggccctgcgcggccacgtcgccgcagccggccgactgctcaccccggtcgccgccgacctgctggccaccaccggccgtccggtcgacctgttcggcttcgccccgaacccggcacgcctcggcgccgcagccgacgccaccgcgtccgtggaaggcgtggcgctgacccagctcggcgccctgctcgacctcgaacacctcggctacagcgtggcccaggccaagccgctcgccgtgctcggccactcccagggcgtgctcgccgtgcacatgacccgcgccatcgaggccgccggctccatcgaggccgccggcaagaccctcaacgagattctggccgtggccgccctgatcggcgccgccggaacccgccgcgtgcgcgaactgggcctgaaccccaagtatggcgaagccagcccgatgctctccgtcaagggcgccacccgcgaacaggttgaggctctggtggcccgcgtcaacaacgctcgcggcccgatctccatcgccgtcaccaactccgacaaccaccacgtgctgtccggctacccggaagacctggccgctttcgccctcgaagccgagcgcgaacaccagcatcaggccaagctgcgcgagcagaagctccacggcggcaccgtgttcaacccgaccctcgaataccttgaggtcaccctgcccttccactcgccgctcatggccgacgccgtcgaacagaccgtggcctgggccggcgcctgcggcttcgaccagaagcgcacccgtgcactcgccgaggaagtgctcctgaaccacgtggactggaacgcccgcgtcaaggcgctgttcgacgacgccgacccgtccaagctgtggatcgtggacctcggccccggcaacacgctcggcaagctgatcggcaacgtggtgcagggcaccggcatcggcgtggtcgaagccaccacgctgtccgaacgctccacgctctccacgctggaaagcgagcctgagcgcacccagaactggaaggcattcgccccgcgcgtcatcaacaccccggccggcgccaagctggtcaccaagttctccaagctcaccggcaagccgccggtactgctgcccggcatgacccccaccaccgtggaaccggaaatcgtggccgccgcggccaacgccggttactgggccgagctcgccggcggcggccaggtgaccgccgaagtgttcgaccgccacatcgccgccctcgaagacgagctggaggaaggccgcacggtcgaattcaacgcgatgttcatggaccgttacctgtggaacctgcagttcggctcctcccgcatcgtgcccaagaagcgtgcttccggcgcgccgatcgacggcgtggtcgtctccgccggcatccccgagctggacgaagccgtggccctgatcgagtcgctgcaggcggacggtctgccgtacgtgagtttcaagcccggcaccgtggaccagattcgccaggtcgtgcgcatcgccaaggccgtgtcccccaccaccatcatggttcaggtcgagggcggtgaagccggcggccaccacagctgggaagcgctggacgacctgcttgccgccacctacgccgaagtgcgcgcctgcgacaacctcgtgctggtcgccggcggcggcatcggcacccccgaacgcgcggccgactacatttccggccagtgggcccacgcctacggcctgcccgacatgccggtcgacggcgtgcttatcggtaccgccgcgatgaccgccaaggaggctcacaccagccccgaagtcaagcagctgctcgtcaagacgcccggtattccggccgacgccaagtccgacgacgtgttcgccccgcaggccgcccactgggtgccgtccggcaagtccgtcggtggcatgtcctccggcctgagccacctgcacgccgacatttacgagctcgagaacgactccgccgaatgcggccgtctgctcgtgcgcgtcatgaagcaccccgaagagctcgactcccgccgcaaggaaatcatcgaagccctgaacaagaccgccaagccttacttcggagacctggcctccatgacctaccttgagtgggcgcggcgcttcgccgaactcgccttcccgtgggccgacccgacttacgccgaccgcttccagcacctgctgcagcgcatcgaagcccgtgtgaacgacacggactccggcgaattcacctccaagctgttcgccgctgatggcgtttctgctgaagaggcagctgccgctgacctgctgacccacgacgacattctcgccgatccggcccccgcactcgaaaagctcgcactggcctacccgcagaccgccgaacttaaggtggttccggccgacgtggcttggttcccggtgctcgtgcgcgaataccccaagcccatgccgttcgtgcccgtcatcgacaacgacctgctgcgttggtggggtcaggaccagctctggcagtccgaagaccagcgctactccgccgattccgtgcgtgccatccccggcccgatctccgtggccggcatcaccaccatcgacgagccgatcgccgacatcctcggccgcttcgaaaccgccgccatcaagcgcgtgcaggacgaacagcaggccgccgatgccgctgagaacgacgatttcgccgcactcggcgaggccaccagcgccgaggacttcatccgcaagtccccgaacatctcctgggtcggccacatcaccgacaaccccgcctacggcaccgccctgggcgaccagtactacgagatccgcgcgtttgacgccgcggccggcaagtacgatctggacatccacctcgacacctactgggacaacgacccggacggcggcacctccaagcacgccgtgcgcgatatcgtcatcccgctcatcgtggaaggcaccgagcccggccgtgtgccggtcgtggaccgcgaacgcctgattccggacgtctacgcgatgctcgccgccaccgcaggcatcggcaacaccgccatcaccggcgacaagctcaccgagatgccgcagcttgacggcaagacctctgacgagcgtccgtttgctaccgccaccgccgcctacaccctctccgccaacctcggcttcgaccacgaagcggccaccggcgccgctctgccgacgaccctgcagcccagccgcatcgctcccgatgcgctggtcggcccggcctggccggcgatttacacggcgctcggctccgtgtacgtcaagggctacccggtgattgaaggcctgctcaacgccgttcacctcgaccacctcatcgaacttgaggtgaacgaggaggacctgcttaagcacaccggtgaaaccatcaccctgaagtcttgggctgaggattacttcgagtccgcctccggccgcgtggtcaccatccacgtgacccacaccgctgccgacggcacgctgcttgcccgcgaaaccgagcgtttcgcgattcgcggccgcgtctactccgatgctttgccggcagacgcccccgagttcggcgacgccgagcacgaggagatcgcgcccacgccgcgccgtctgctgcgccgcgtgaaggtcgtcgccccacacgacatgaccgccttcgcccgcacttccggcgacttcaacccgatccacacctccactcgtggcgctcgcatctccggtttggccgctccgcttgtgcacggcatgtggctgtccgccaccgcccagcacgccgtgcaggcgctggacgagaagggtgcccactacgagattgccggctggacctacaacatgtacggcatggttcagcttgacgacaccgtcgaaatctccgtcgagcgcgtcggcaaggtgcgccacggcggcatgaccctcgaagtcacctgccgtatcgacggccagctcgtctcccgcggcaccgcactggtccgcgcgccgcgcgccgccttcgtctaccccggccagggcatccagaagcagggcatggttctggacgagcgtgccaagtccgccgccgcccgcgacgtgtgggagcgcgccgacaagctcacccgctccaagctcggcttctcgatcctgggcctcgtgcgcgataacccgaaggagctcaccgccaacggcgtgacctaccgtcaccccgaaggcctgctcaacctgacgcagttcacgcaggtggcgctcgcgacggttgcttttgcccagaccgcccgtctgcgcgaagccggcgccgatatctggcctgcatacttcgctggccactcgctcggcgaatacaacgcgttgtccgcgttcgccgacgtgattccgctggaaaccgtgctggagctcgtgttccaccgtggttccaccatgcaccacctcatcgagcgtgacgcacagggtcgctccaactaccgcatgggtgccctgcgcccgaaccagttcggtgtggacgacgcgcacgtcaaggaatacgtggaatccgtggccaaggcgtccggcgaattcctggagatcgtgaactacaacctcgccggccagcagtacgccatcgccggtacgatcgccggactcaaggctctgaaggccgattccgcccgccgcgtggccgcattcggtggcaagcccgcgttcatgctggtgcccggcatcgatgtgccgttccactccacactgctgcgcaagggcgtgccggaattccgcgacaagctcgacgcgctgcttcccgcttacatcgactaccgtggccgtctggtggaccgctacatcccgaacctggtggccaccccgttcgagatgaccaaggaattcgccgccaagatcctcgaagtcgtgccgtccgagcgtatcaaggccgcgctcgacgacccggccgtgtgggattcctacgccgatgacgaccagaagctcggccgtctgctcttgaccgaactgctctcctggcagttcgcctccccggtgcgttggattgaaacccaggcgctgctcttcggtcagcgcgaacagggcggcctcggcgtggaagaatacgtcgaagtcggcctcggcaacgccccgaccctggccaacctcggtgccaagaccctgcatctgcccgagttcgccggcaacgatacggtcgtctacaacgtcggccgcgatgaaggccgcgtctacatgaccgacaccgattcgctggttcccgacgatgagccggaagaggctgcggcctcggccccggtcgaaaccgctcctgccggtggttccgccgttgccaagctcggttccggtgccgctccggcaaatgccgtgactgaggctgctcagacaacggatggctccgtcgccggacagtccactggactgtccgactcctcgcgcggcctgcaatcagggcaggccgcggccggcgcgccgtccggtgccgccgtcgccgacctgcccttcaaggcttccgatgccatcggcgtgctcatggcctactccgccaaggtgcgcatcgaccagatcggcagcaacgacaccaccgacaccctgactaacggtgtctcttctcgccgcaaccagctgctcatggacatcagttccgagctgggagtcgccagcgtggacggtgctgctgaagcgacgctcgacaagctcgcccaaatcgtcaacaaggccgccccgaactacaagccgttcggtgccgtgctatccgaggcgctgcgcgaccgcctgcgctcgctgttcggtgccgccggcgtcaagcagcagtacatccgcgaccgcgtgaccaacgtatggcagctcggtgaaggttgggtggccagcgtgctcgccacactgctgctcgacactcgcgagggtgccagctcccgtggcggcgacctggccaagctgcccaccgccgccgtgcagaacaagccggaagccgacaagctgattgatgcggccgttgaggtcgtcgcccagctcaagggtgttgccgtggccctgccgtccgccggtggtgccgctggtggcgctgtggtcgattccgccgcgctcgacgccttcgccgagaaggtcaccggttccaacggcgtgctcgccgccaccgcccgcttcgtgctgaacgagctcggcgtggccgctccggctccggaagaatccgaggacgagaacgccgccgtcgtggccgcggttgaagccgaacttggctccgactggcccaagcaggtcgctccgcgcttcgacgccaacaaggccatcctcttcgatgatcggtgggcctccgcccgtgaagacctcgcccgcgcctactacgacaacgatcccgccgccttgaacggcagcttcatcggccttggcaagaccatcgccgccgaagcccagtggttcgccaacgagtcggagagcgaagaactcaaggccgccttccagaaggccggctccgaggccctcgaacaggttgcgtccaacaagaacgcctcccgttacgcgaatgatatcgccatcgtcaccggcgtgagcccgaactcgattgccgctcaggtggtcgaaggcctgctcgcaggcggtgccactgtggtggccacctcgcacagcttcaagccgtccattaaggcttgggctaagcaggcctaccgcgagcacgctaccggcaacgccaagctgtggctggttccggccaacctctccagctaccgcgacgtcgacgcactggtcgactgggtgggccacgagcagaagaagacctccggtgctaccaccacgattctgaagcccgcgtgggagccgactctgttcttcccgttcgccgctccgccggtccatggcacgctcgccgactccggcgacctgttcgaatcgcaggcccgactgatgctgtggggcgtggaacgcgccatcgccggcttcagccacatcggtgccgacaccaacgtgcagcacaagctccacgtggtgctgcccggttccccgaaccgcggcgtattcggcggcgacggtgcctacggcgaagtcaagagcgcctttgacgccatcgtcaaccgtgcccgcgctgaaaaggtgtggtcgagccgcgtcaccttcgctcacccgaagatcggctgggtgcgtggcaccggcctgatggtcggtaacgacccgctggtcgccgtcgttgagcgtcacggcatccgcacctactccaccgcacagattgcggccaagctgctcgacctgtgcactgccgaatcgcgcgagcaggccctcaaggccccgctcgatgtggacctgaccggtggcctcggctccgagcccatcgacatcaaggccctgcgtgcggaggccatggccgacgccgagaaggaagctgctgcggcctcgtctcaggaaacggatggctccgtcgccggaaagtccactggactgtccgactcctcgcgtgggcagcaaatcaaggcgctgcccacaccgatcgtcaccaagcaggctccggtcgacttgaacgattggaccaacgtcactgccaagccggaagacgaaatcgtcatcgtttccgtcggtgagctgggcccgtggggctccggtcgtacgcgcgcccaggccgagctcggcatccactcggacggcaccgtcgacctcagcgccggcgcagtgctcgaactcgcgtggaacatgggcctgctgacttgggccgacagcccgaagcccggctggtacgacaccgacggcaacctcgtgcccgaagaggacatcgccgagcgctaccacgacgaggtcgtggcccgctccggcatccgcccgttcgaggaaggcatgggcaacgactacaaggacggtgctgacgaagaggaagccgaggtcttcctcgaccacgacgtcaccttctctgtgcccacccgcgaagtcgccgccgaatacgtcaagttggacgaggctcacaccaccatcgccccggatgaggaatccggcgaatggaacgtgacccgccacgccggctcgatgatccgcgtgccgcgccgcgccaccatgacccgcacagtcggcggccagttcccgaagggcttcgacccgacccgatggggcattcccgcctcgatggtcggcgacgtcgacaagatcgccctgtggaacatcgtcaccactgtggacgcctacctgggcgccggcttcaccccggccgaaatcctcgagtccatccacccctcgctggtggcttcgacccagggcaccggcttcggtggcatgatgtcgatgcgcaagctgtacctcgaccgcttcctcaaccacgagatcccgaccgacatcctgcaggaagccctgccgaacgtggtcgcggctcacgtgatgcagtcctacatcggcggctacggcaacatgattcagccggtctccgcctgcgccaccgcagccgtctcccttgaagagggcgtcgacaagatcgccctcggcaaggccgacttcgtggtcaccggtgcgatcgacgacatcggcgtggaatccgtgatcggtttcggcaacatgaacgccaccgccaactcggaggaaatgtatggcaagggtatcgacgcgcgcttcttcagccgcgcgaacgatcgtcgccgtggcggcttcctggaatcccagggcggcggcacgatcctcgtgacccgcggtgacatcgccgaaaagctcggcctgccggttgcggccgtggtcggcttcatccactcctacgcggatggtgctcacacctcgatcccggctccgggcctcggtgccctggctgccggcctcggcggcaaggactccaagctcgtgcacgacctggctaagctcggcgtctcagccgacgacatcgccgtggtctccaagcacgacacgtccaccaacgccaacgacccgaacgaatccgagctgcacaacacgctggcccacgccatcggccgcaccgacggcaacccgctgttcgtgatctcgcagaagacgcttaccggccacgccaagggtggtgcctgcatcttccaggtcaacggtctgacgcagctgttcaagtccggcgtgattccggcgaacgcggcgctcgactgcgtggatccgaagctccagcgcgacgaccacatggtctgggttaggaagcccctgcgcatcggcggtggtgaggacgagttcggtcgcgagaccgctggtcgcccggtcaaggccggtctggccacctcgctcggcttcggacatgtttccggcttcgtggctctggtccatccgggtgccttcgaggcggccgtggccaaggccgatggtgaggccgcactggaagcttggcgtgagcgtgccaacgcccgcctggccgccggccagcgtcaccttgaggaaggcatgatgggtcgcgccgcgctctacgagccgatcgacaaccgtcgcttccgcgaggatcaccgtggctacgaccaccacgaggtcgaaaaggcgatgctcctcaacccggacgcccgcctcggtgccgacggctactacgaggcctgattcctctggctcccctcggttgatgggagccagtagcgcaccggatctcggctcccctctttgaggggagctcccgcgaagcgggtgaggggagtttcccctggagctttctcgctggcacaaactcagtgagagaaatatgcagaacatacgaaagcccctccctcggagtgggctttctgcgtttcaaggggctgatttggcattcgccggaggtctacttccgtttcaaggggctgttacccaagtagacaaggcgtaaaaacggcggaatggcgttggcgttatgctgcggatactcgtggtatggaggatgaccagccccttgaaacggaagtagacctccggaacggtcaaaatccgcccctcgaaacggagatagaccttcggggcggggcgcggatgtttttttggacggctaggcagccagcccaagatgtttgcggtattgcgcgaggtcatccagcatagtgaatcttttccccctgaaatggaaatcaggccccaattctgatgaggtgtagagattacgcgcgaagcggtacacaataggaagcatgaatacttgtggtttggggcatgacgtggtggatgtggccgcattcgccgaacagttggcggagccggggtctcgcatgcgtgcgctgttctccgtgcgtgaggtgcggcaggcatccgaccgcgcgcgccagaagaatgacggggaggccgtccatctggccgccaaatgggcgggcaaggaggcgttcctcaaagcctggtgcgattatcttggcgatgccccctatccgttcacgcttgataatttcccgtggcctgaaatcgagatcttggacgattcccgtggtgtgccgcatgtgtctctgggtaagggggcggcgtcagtcttccaaactgattacgcgaattcggctgccggcgctcgctattcctctgcttattcctctgcttattcctctgcttccgataacgggccttatgcagtgatgcaggagcggcggaatgcgcgttcggcgcagcgctcgactatcggtgcggggtcgatgccgcatatccatatttccctgagccacgatggttcgattgcctccgcggtggtgacgatttctgtggaatagcgcccgaggcccccgagtgctacatgctgtacaacgtctccatcatggttaacctgtggggcgcgctcaccagccgcgacgtgcgcctgctcaagaaccagatcgacaagctcgactcgctgcccgaaaactgctggttcgtgattctgaatgcgatgggcgccgacctccaaccatacgagtcccagctcatccatttgtgatttcgacggtttccagctcccctctttgaggggagctgtcgccgtaggcgactgaggggagtcctcggcaaagccgcaatccatcaactagatttgctggtcctgctgcagccacacgcgtttgccatccccgaagaaatatgtataataactcaagtcgccaaaagcgacgcttaacgcggatgtagctcaatggtagagcctcagtcttccaaactgattacgcgggttcgattcccgtcatccgctccactatataggtttgtggctagggtactacccacaacattgcccgtaacaccaccgcccgcaacagaacacggccttggtgagtcgtatgtttgcgttcacagaaattgcatgtagtatgtctccgtgtatgcgtagcggtatgtgatactgcacacatgcggagcagtggcatactgacggtcgtcagtaactccggcccccgcgcagcggcggcaaatccgcctcagttcccagatggtgggaccggcacgccccgtcgagaagaaaagtgcgttatcgcagggtggatgacgagggtgccacttttcaaaaattccaaggttcttttcagtgtcgggtaaaaaattccctctacccgggtgtacgcattcgtgctttttgcttaataccgtaacgccttataagcgtaacgccgggttttggcgtacgtgatcgtaagagacaggcaaggttatgaagagaattgcagaatggttcgcagcggtaggggccgcggcgggcaggaaaggcaaacggttagtggcgatcgttgccgccgtggcgatgctcggtggcgtcgccggtgtgagcgcgaccgccatggcggacgatgggaatgcctccacgacacaatcgcagaccaccgatgagaaggcggccgccagcgcgcctgctcctctttccaccgagggaacaaacggcgtgccggatgatccgacgttgtctgctccggcccgcgagaagaccgttaccgccaatgaagacggcacgtacacggtggcgttgaacgtcaccggtgcgaagagcgcgggtacgggcgagatcgtgacgaaccagccactcgacatcgtgctggtgttggatgtgtccggttcgatggccgaaaagatcgctagcggttggaaccagcctacgaagattgactcgctcaagaccgcggtcaataaattcatcaatgcgacggctgcagagaacgcgaagattaccgaccagagccagcggaaccgcatcgccctggtgaagttcgccggcaccgagaagaccagcgtcggcaatgacttttaccgcgaaggctggtcctcctacaactacacgcagatcgtcagcaacctgacgtacgacgtctccggactgacgagcacggttaacggcctgagcgcgtccggcgcgacctccgccgactacgccttcaaccgcgcccaggcggcgctaacgtatcagcctcgcgccaacgcgaagaaggtcgtcatcttcttcaccgacggcgagccgaaccacggcagcgggtttgaccccaccgtcgccgccaccgcggtgaacaaggcgaagagcctgaaggacgccgggacgaccatctactcgatcggcgtcgtcagcggtgccaaccccggcgacacctcgagcaacctgaacaagtacatgcacggcatctccagcaactacccggatgccactgcaacgagcagtgagcatttgtggggaaagtcttggaacgccaacctcggtgaccgcgccgagaccagcagctactacaaggccgccacggatgccggccagctgaacaacatcttcgagtccatttatcaggagatcaccaagacggctgagtatgccgacgtgacgattcacgacaggctgtccagctgggtcgtgagctccgacagcgcctccgagaatggagagcccgcgggcttcacgtacacgaagacccggaaaggccagaccacggcgtgggctgacgccccggaggcgacggttgcggctgatggcaccgtgtcttggccggtcacgtccaacgacgacacgcttgaggacggcgtcacctacacggtgagcttcaatgtcaagccgacgcaggctgcgttcgacgaggctgttaagaaccacaaggacgatgccaatgcctccggcgacaacaacttctacacgaacgacaactccagcgccactgtcgactacaagaccgtggtgacctcctcgcagggcggcacgacgacgagcgatccgcagaccgccgcctacccgcagaagccgaccatcacccttccggtctccaagattacggtgacgaagacttggtccgacgacaacgagaatcacgcgaatgattccgtgcaggtccagctcaagcaggacggcgaggattatgccaacggttcagcaactctgaatgccgccggcaactggactcacgagttcacggtgcctgccggccctgaggggcacacatactcggtttccgaggtcaaggttgaaggctatgactccaaggttgataagactgacctcaagctacaaggtttgaccgcacaatccggtgccttcacggtaaccaacacgccttcttacgtgaccttgcccgcttcggatgtcaaggtgacgaaggttgtgcagggacatgctgctaattcggacttcggcttcaacctgaagtgcgtggatagcacggatgcgaatgctggtaagtgcgctgacgttaccggcttggccaacaatggactgactacgactgtgtccaaggacgaattgactgctagcggcgcgagcgcgacggttggcttcggcaatggggacctgaagttcagggttccgaccggtgctgacaatttggtctacacgttcgaggcttcggaggacaccgaaaagcctgctgccggttggaagtatgacaacgataaggtgaccgtcaaggtcacggtctccaggacggatgccgttgtctcttacgagtacggcgagaacgattccgaccgaacgaatacggagtcggcacagttcacgaacaagtatgtggctatctccagtctgccgctgaccggtggcacgactggtcgtgactggatggtgttcggcggtggcctgggcctgctggccctgctggctgctgcgggctacacggtctggcgtaagcgtcagctggtctgatttcaagaaacttgaggtggttttggctcctctcgctgaggggagctggccgccgaaggcggactgaggggagtcgatgaaggcttccctccccgaaaaaaacaataaggatttgcggatcgcggaggccccgctgtggggttgcagcctccgcgattgcaagaaaacaatcacaataaggaagagagggtttctcatgaagttgaggaagcttttcgcgggtgccgctgctgcggccaccctgctcggtggcatggccttcggcgccaccaccgccaacgcggctgaggccaacatctccagcacgactatcacagtcaacgccacggatgcaaaccagttctacaccaagccggttgacaccgctgacctgcaggctaacctgcgcatgttcaagtacgttgagctcgccaagtatgtgtctgatggcaacactggcgttgagctggagggtttggtctccggtgaggcagtggatgctgctttcgctgctgctggttacaacgaccagaccaagggtgattccctgaacgagtgggcctggctgggcaacactaccctgaccgccgcgcagaccaccgcttttgtgaacgcgcttaaggatctggctgtcacggacattaccccgacggcttctaacggtggcaagacccagaccttcaccttcgctgagggtggtctgtacttgattgtcgaccagagtggaaagctggtcgtcgaagataatgacactcacaagctcgtgtggaatggcaatgctccgattctcgctggcactgctatcacggtcgccgcgccgtccgtgaacaacgccactggcgttctcgccgctgccggcgttgtcgacctgaagagcagcaaggaagaaaccaccaaggctggtgccgtgacttggcagaaagtcgacaagaacgctgctgctctgactggtgctgagttccaagtgtacgaaggcgatgttagcggtctgtccgctgacgagctcaaagcgaagactccgcttaagttcaatggctctaacggtgcgtattctctgccgaccgccaatgctgatggcacttaccctgaaggcgccacggacacactgcaatccaacgctgagggtaagtacactctgaacggtcttaagctcaacaccacctacaccgtgattgagacgaaggtcccgactggctacaacggcaccttcgttggcaagttcacgatcactaccggtgcaaccgcagatgctgctgccaccttcgctggtaaggatgcctggaacctgtccaaggacaacaagggcaccttccaggtcaccaacgtcaagaacatcacccagctgccgctcaccggtgccgccggaaccatgctgttctccgtgatcggtctgctgatcgcgggtgccgcggtgaccgtgttcgtcaagtcccgttccaccaagcgcgctctcaacgcgtgagcttgactgctgcttatgactgagcagctataacaatggccgatctgattattcagatcggccatttgtcatattggcggcatctcagacggatgacttgtggaccatctccgaatcttatgggcaatgtatggcattttgatttgaatgtaatggggccgggcatcgaaaataacttgtgtttcaccacaacaaacgtttcacgcaggctcggtaacaatcgccaagcgaacacaatcgtaggggaggtgaaggatgggcctgtataccccattcgtgggccgattatcgttcagttgccgtccagccactactcaggctccacttaaacggggataaaaacgaccctactaggggttaggcatgtccgaattataagtattactatcccgaactatggcattcaccccataatcaaggggggtgtgcaatgagccttccaacgagtgtaagggatgaggatgaccagtggtggagggacttttagccccgaggagatcaagtatctgaagtcgttgtcggcagtggcggaagccacggcgaagcgcatcacctataccgatgatttcaagcgttactgtgtagtccactacaacgaaggtgcctcacccgtgcgcatgttccgtgaagccggattggatccggctctaatcgggtacaagcgcatcgaacgttgccttgcccgctggcgtgaatcgcaagacgaaatcctgaactccggcaatgccaaagccggcgtggaaaataagctgggggggggcttcagattcggagcttttccgctcgggagccgcgggcgcaccaaacattccggagagtgcgcgagcagcgagagcttggcgcgactcggcggaatcgtcacttccggctggtaccggcagcgaatccgatttccacgtatcgcccgaacgtcgcgccatcatcttccccgtctcccgcaaagagcagaacaatgacctacgcgacttgctgatttcgcagcaggtacgtcgtatcgacgaactggagcgtcaggtcgacatgctcgaggccctgctgcacggcaggcggcgtaaggaacaggctgccaatacgttgcctgaggaacagacggatacagcggcggacaagtcgccggatacagacgggcaacagcagtagcctgtctgtatccaatcagtgcgcgaaaccacagggaacatcaggtacttgcccaacacgcacgctaagataggcatcgcaataatcggcatggcaatacatggcaataagcaggtaatcggcgaggcggtgcatggagcaggaatccaacgagcaagaacctaacgaggcgacggaaatcgtaggcggcaaagtagagaccgtcgaggtttccaggcaccccgaggcttccatacccgagactgatttgtctttggctgatatcgagcgccgtcgctcccatccgttgcgttgggcgttgatcattcttgccgtactgtgtgccatcatcgcgccatactggttcggtcgctcgctggcggtgaataatactgactccattgtggccgtgctcgggggagtgtctccgcaaggtatcgcactggtcggttgggtggccgtggtgatcacgtacgtcggattggcgatggcggtggtcgtctcgccgtcctggccatggctgatcgtgttcgtgctcgggctggcctgtgagcagttcatcgcgggactcagcatgctcaatctcaacttctggtattccacgtacgtggtctacggcaagcaggccggtctggcgaatgccgcgaacctcggcattatgggggcggcgatcggcatcgccgtatatgccctggtgtttgttggtctgctggtgattatccggaagacctcgccgctgaacgtactgaccaaaagctgggcgagtttcattctgtacttcgtgattgaaaccatcgccctgctcgtggtgttgtttggcggattactcaccactgtgtgagcgcacgtgagtcgccgtacgtcgctcagtactcaccgctcactgctcaccaccgcgcaaaccgtgtgcccgatgtctatttagaggtgcaacaccccctgttggtcctgcaattatagcagttcgtcggcgaatgcctcggcgggccggattcaatttgtaagcgcaacgcttgtgttcgggctggctgccttcgattgtagcttggcgatctcctcgtcccatacctcgttgggcgttttgtagccgaggagcttcatcggggtgtcgttgatctcaccgacgatcgcgtcgaggtcctcctgggccaagtccccgaacccggttcctttgggcagatagcggcggatcctgccgttcctgttctcgttgctgccacgctgccaggaactgtacgggtcggcgaagtacgtgagcatgcccagcgcctcgtccaccagcatgtgcaggctcgcctccgtgccgttgtcccacgtgcggtcgacgcgcgcggccggcgggatgtccttgaagatctcgtattcggccctggccgtggcggacgcgctcttgtcgtcgacgagccgggcgaacagcctgcggctcctgcgctccacctgcgtgttcatgcagcgcctcgacggcgcggcgccgaccaccgtgtccgactcgaaatggccgaaccccttcctggatctgaccgcctcgggccggtctgcgatgggcgcgcgcatcgggatgcgcggccctttcgccttcctgccctttttcctcgtccggcgtttcctgccgcgcgccaggtactggcgcaggtccagcgcccgctgcggcttggcgtagatccactggtaaaggcactcgtggctgatccgcatcgacgggtcgccggcgtaccgggccttcaaccgtccctcgatcagttccgggctccaccccctgcgcagcgagtccagcacccaggcgcgaagccggtccgagtccatgcgacgcggcttgcgggatccgcgccggcgcaggtccgccttcctctgcgcggccagcgccgaatagaacggacccgaggtccacggcccggtcttcagccgtttcggccggtagggacggtacgacccgttctcgttggacgcgaaccacaggccgcgcctcagctcgcgtgacaccgtggacttgtcccggccgatcctctccgcggttcgccgaatgctcagatgctgttcgcaatgcagcttctcgatcaggatcctctcctcggacgacaggtgcgaatactgttgacccatgagtgcaacaccttcttaagttagaaacttcgaacacttccaaccttagacaaggtgttgcacttctatttagaacccggggcgtaaacacgattgccttcaaagaagatggtcgtgactgtgctggaatcaatgttcggtgctatgaagcgaagcgttggttgtgtgtctaagctggccgcattgttgaatgaggctcaacttcggggtgtcgttttatcggctgtgatgttattgtggcgcgacacgccagctttataggcgatgagtggtggcatcagatgagttcgcttgtacgtctccattctttgttgaaatatgttatgcaaagtgtgtaattggcatatgaaactgtcatatttgatgtgttgcgttgcgtttatgtgaacttattttcattgtgcatatcgttatcaatttgttatcaaggacgatcgcgagtgaaatgcgctcatttatataatggctgctgcatggctgcccttgagggacgttcctctggcatggctttgcaatgagccgcgatgtggtcgtaaccaacgtgggattcgattgtgcggcgaagaaaaaatgatggggggggggggagtcgccctccatcattcaggaaagggaactgaatggtttataacattcacatattgcaaacaaggaaaaccggtcgtgtggttgctgctgcggctgcatccgtgctgtgttgcatgggggctgtatttccagcgactatcggagtgactgcggcgtcggccgatgaacccgtcgaattggtcgtcaacggcggattcgaagacgatcttaatggttggaagtctggaacggtgtggaatagctccgcatcgtccattgccgtcactgcggatgatgtgcatggtggcagtggcgccttgagcgttactgatcgtacatcctctgatgctggtgcaatccagtctcttgatggcaaggtggaaaaaggacagacatataccggaagtatgtgggtcaaggccacggaagacggtgaattcaatatcactgtttgttcgggtaatggttccggatgtgaccagattgcgaccggaacggcgaaagcgggtgagtggacacaaatttcaggtactggaacgttaggtggtagtggtgatttcaccagtccctcgctggtgattgaaaacaagtatggcacgagcaatgccgacttcattgtcgacgacatttccgtaaccggttcggattctggttcctcattcgtgccgccgactacgggtacggcaacggcagccaaggctttcggcgactattcaaacccgattatcgattattggtatggcgccgatccgtgggctatggaatacaacggacgcgtatatatctacactacgggtgatggcacttctgtgaatgctgatggctcgttgaattatgactatgaatatgacagtactgggcagatcaaggacaattcgttcgctcaagtaaagaccatcaatgttctgtccagtgatgacatggtcaattggcgtaatgagggttacattcgtgtggctggagaacagggggtggccacctgggccagcaattcctgggctcctgccgtcgctcataagaccatcaacggtaaagagaagttcttcctgtatttcgccaatggcggcagcggtatcggtgtgctgacctcggattctcctgttggtccgtggaaggacgaaaccggtgagctgttgattaagggcggtactcctgaatccgctggtgtggtctggctgtttgatcccgcggtgttcgtggatgatgacgggcagggctacctgtattacggaggtggtgttccgacaggcgaggaagaacatccgaacacggctcgcgttattaaactgtccgatgacatgctgcataccgaaggtgaggctcaggccatagacgcacctgccatgtttgaggactccgggattgccaagataggtggtacttattactactcgtattgcactaatttcagccatgacaacgtaattgatggtaacacggtcggttacggcaatatcgcgtatatgacttcagacaacccgatggggccgttcgcttatcagggtgagattctgaagaatccgagcacgtatttcggtgttggcggcaacaatcatcacgcgatggttcaacttggcgaccagtggtatatgacctaccatgcgcaaacggtggcaaaggaattgatgaacggcggtaatcttgacgcggcgcatggctaccgaaatactcatctcgatccgattacggttaacgaggatggttccattgccgatattgcaatgacatatgagggtctctcttcggtgaagaatctggacgcgtatcaagatggaggcattccagcttccaccattgcatgggattccggcattcagaacgcatatgacctgacttctggtgtgcgcgtggtcgatatgactacagacaattccgaaggtcagaagctcagcaatattaataatggtgagtggacgtctttggcgaatgtcgatttcgggaataacggcgcctcttcgctgactgtgactgcagctggcaaagccggaggcatccttgagattcgtcttgatgatccggattccgaacctgtggcttctatttcgattcctgccggtgatggatccgagtacgccgattacacgaccacccttgagggtgtgacaggggtgcatcatgtggtgttctccttcaaatccgatggtggtgcgaatgctcaggatgagctgtacgacatcactacgtacactttcacggagtcgcaggatgaaactccttcgactccggtggacaagtctgatttgcagagcgcagtgaatgagaattccggcctgaacgcttccgattacacggaagagagctggaaggtgtttgctgacgcattgcagaaggctcaggcggtattgcaggatgaatccgctactgaacagcaggttcaagatgcgcttgctgcattgaatagtgcacgtgccggtctgaagctggctgatgattccactgatggcaatgccgacggctccaatgacacggatggcgtggatttggcacaaaccggttcctctgtcttgcctggtgctgtgattgtcgcttgcttggctctcactggtgtgatcgtagcgcgagtgcgtcgcgagatgcgctagttacctcttggtaatgcggtcatcccgtagcggcagcctcgggatgaccgcacatgaaacctagaactggtacttgttcaagcgtaagttttggcagtggtaatgtccatcacttatccatatgcgggaatgtcttatcgtcattcattgctgatttgtgcgggcatgctattggaatacgcactcgatgttgagtgcttatcatgaaaggttaaaagacttatgaattatttacgacaaaaaatttcggctagtgctatcgcggtgttgtcgacttgtgggttgattttggcgccaatgccggtctttgcggatgattcaacgccatcttcaacgccatcggatggcagttacaccacgactgatagcggtgatggcacgtattccattcccatgttgaacacggatgttccggatatcagtgttattcgtgtgtcgaaggacgatccgaataacaaagacggtcgtgatgtgtattacatggtgagtaccactatggagctcagtcccggatctccaattatgaaatcctatgatctggtcaattggtggatagtcacgtacgtgtatgatcgcatttctatgagcgatgcttcatccttgcgcaatggagctagctcgtatggcgaaggcgagtgggctccgtcgctgcgctatcacaatggccgcttctacgtgttattcaatacgaacaaccttaatggcgcttatatctactacaccgatgatattgagaatggtccttggacgaagattgcccttaatcggggattccatgatccgtcattgtattttgatgagcaagggagtccttggattatctccggcgtcaaccaatataggctgtccgatgatttaaccacggtggtggagagccatgagaatatcatctctgccgaacagttcactgatgatcttggtgagactcctaccggatttgaaggatctcagactttcaaaatcggtgattatttctatactccaacgatttactggggcaaagacggtcgtacggtgatgctgctgcgcaccactgatttgcttgatggctccaaatacgaagccaaaaagtattatctaggtgctttcgcacaaggtagccttgttgaagtcgacaacggtgatggcacgacgtcttggcatggattcttcttccgagacacatatccgaccggacgtattcccggtttgattcctgcaacgtggggtgatgacggatggcctgtgtttggggacaataatcaggtaagcgcgtcggacacctacgacaaactgattgatttgcctgctgatttggagaatctggttcgccagcgttccctggtcaattcggacgattttgataatgacgcgcctcatcagtcttatcaggatcaggattggtggactctggaggagcctcctcaggttgacgattctctgattggaatcgagctggtggacaatggcgatttcgaaaacgggactgaatcgtggacccctcagtggaatggtacgcttaccgcgattacggatggttctctttctggaaccacgagtcttgctgtgacgaatcgtggcgaatacaatggcgctggcccgggtcaatctatggatggaaaattgcagcagggcgtgacatatcgtgccagtgcaacgattcgatacgaccatgagatggacggcgtcgattcatcggctgtgacttcccacctgttttatgtggcgattcaatatgcagacggcacaattaatcgtgtggccacaggaacagtgaaacgtggggagacgactactatcacaggtgagttctccatcccatccgacgctaatgtggaaggttccaaactcattgtcgaaaccgcgtggggtgcggaaggcacgtgcatggattacgtcatcgacgatatttccctgatcggtcttgctgatgagaaggaatatccggtcgccgaagaataccaacccaatggttcgaatcttgatttggtatgggaatggggacataatccagataaccgatattggtctctcactgatcgtgaaggctggttgcgtttgaccaatgggcacaaggtttccgccacggccaaatatatgaaaggcacttatggcgacctgacatattttgaaaccgcccgtaacgttttgtcgcagcgtacctttggcggatccatgtctgtggaaacccacatggatgtcagtcatatgaaggatggagacaccgcaggcctcgctacatatacccgtagttttgcctatgccgctgtgcgtcaagaaaatggacagcgaacgttgggcgtggtcaagcgtgtctacgacaatggcgtgaaggacgcggacggtaatatcgttgacgatacgattgatcgtgacgctgaagaggcctttgtatcgggcggcacagtgacattgccagatgatgcgaccaatgtgtggatcaagtcggacaacacactggataatgcgagtggtaagttgacgattcagtattggtacagtctggacggtaagcaatggtccaagcttggcgacgagcaggggccgctgacttacgattggagcttgtcgcactttaaggggtatcgaatcggcttgttcaattacgccaaggagaatacgggtggttatgtcgattttgattactatgacttgagcgacgtgttgacttctgacggcaaagctgtggatacgtctaagctgcgttcggccattgatcaggctgactctctgcagtctgcggaatatcctatggatgagtgggataagatgctcacgctacttgataaggcaaagcaggcgttggcatccgatccttccacgcaaaatgaggtggatgccccgcagcgtgcactgagtttgcagctcgcgcaattggcggttgaccgtcagtctggtgatggcggaaatcctggtggtggtgatcagaccggtgacggtaaccagtcgggtaacggcgatcagaccggtgatggcggccagcaacagtcttctactgctgatgataattcatctgaactgtcatcaactggttcgtccgtaacaccgatggtgctgtctgcaattgccctgatgctggctggcatcagtgtcattcggatacgccgctcttcgcgctgaaatatcgccgcagcctgttggttgcagcgattgaatgtgcggaatcagtgatgtgtcgcaatggtgggttgtgcgaatgctcggcaacgtggattcgtacaacccatcctgttatgttgagaccgcggcgtgagacatggtggagcatgacatcggcgtagaatgtgcgattttggaaacaaaggagctggtgtgtgggcggctggcagttttcatttcgaatcgacggcgttctcctgatatcaagtatggctgtgtatctatgttgccgttatgtggtgatgttagcggagtgagtaattcggatatggttcgcccttatgaacatatgtatggcttatgtcgtccgccgaagcatggttgcgattagcgaaaatcaggtattgcggcgttatgtccggcgccatgtcattatcgtatggcgcactcacgatacaataccgtcctagcatgggcgtcgcggcatgagacgacgcattgtgcagacaggtgtggcgtcgaacaacgaacgcgaggtaaacgtagatggcggtgaattccagcgtggagaaacagccggtcgaccagcaggcgagcggtgaggtgcaggctgaaatcgatacgcggtccgatggtgtttcgcccatgcccaacgatgtttccaaacataacgatgtttccaagcatccggtggcgtccattcccgaatcgacgctgtcgctggccgatattgagcgtaagcgctcgcatcctgcattgtggctggcttatgcgctgctggtgattgcggccattgtggtgccgtattggtgggggcgtgcgattgcggtgaacgatacgcagtggctgcttgataatttgagcgcgcttgagctgcgcggcgccgcgtttgttgcctggacggtgacgctgattgccgtttccggccttggtctgctggttgttgacgcccatcggcgcttgtggggcgcggtttttgtgattggcttggcggcggagcaactcattgccggcctgcgcattctgaaaattgatttttggtatgcgacatatgtggtgtacggagagtcgtcggcattggcgaatgcggcgaatcttggcattatttcagttggtattggcgttgccgttttcgcggtgctgtgggtgggattgttggtgacgattaaaaaagagtcgccgttgaatgtgctgacgcgcagttgggcgtcgtttatctttttttgtgattgagacgattgctttgcttgttgtgatgtttggcggcctgctgacgttggtctgattcgtggtgtctggtgctcctgtataattgacccttggcgtatttcgcccgcggatagagagcgcgccggcatcgggccggtagcaccgcgcagcaatataaggaggatgccgtggcactgacggctgaagaaaagcaggaaatcatcgctaagtacgcgacccatgaaggtgacaccggctctccggaggtccaggtggctctgctgtccaagcgtatcgccgacctgaccgagcacctcaaggagcacaagcatgaccaccactcccgtcgtggtatgcagctgatgatcggtgaccgtcgtcgcctgcttgactacctcaagcgcgttgacatcaaccgttaccgttccctcatcgagcgtctgggtctgcgtcgataattgaagacttccgcccgagtacctaggatggtgctcgggcgttttacatatcgccagccaacggcaacaacggcaagagggttagaggataggccagtagggcgccgaaaccggaaacggtacgcacgcaggtagccagtaggtaaggccgacgagagaacccgaatgaaggggttgacacgaggagcgacggccaaggggccagtcgaaacaaggtatgtgacgtccgctgaagaggacagttgcggttcaagcgagtcgccaaaccgcaacacagtatgtaggaataaatagaaaattaaagaaggaggaaccctatggagggtcccgaaatcaaggccgttgaggccgtaatcgacaatggatcgtttggtaagcgcacgctgcgcttcgagaccggccgcctcgcccagcaggccgatggcgctgtggccgcctacctcgacgacgattccatgattctgtccaccaccaccgccggttccagcccgaaggagaactacgacttcttcccgctgaccgttgatgttgaagagaagatgtacgctgccggcaagattccgggctcgttcttccgccgtgaaggccgcccgagctccgaggccatcctcgcctgccgcatcatcgaccgcccgctgcgcccgctgttcccgcacaccctgcgcaacgaagtgcaggtcgtcgagaccgtgctcgccgtgaaccctgatgacgcttacgatgtcatcgccctgaacgccgcttccgcctccactatgatctccggcctgccgttcgaaggcccggtctccggtgtgcgtctggcgctgatcgacggccagtgggtcgccttcccgcgttggagtgagcgtgagcgcgccgtgttcgagattgtggtcgctggccgcgtgatcgagaacggtgatgttgccatcgccatgatcgaggcgggtgccggcaagaacgcctggcacctcatctatgacgagggtcagaccaagcccgatgaggaggtcgtggccggtggtcttgaagccgccaagccgttcatcaaggtgatctgcgaggctcaggatgagctcaagaagatcgccgccaaggagaccaaggaattccagctcttcccggagtacaccgacgagctgtatgcccgtatcgacgagatcgctcacaaggatctggacgaggcgctctccatcgccgagaagctgccgcgtcaggatcgcatccacgagatcaaggagcacgtgcgcgaggtgctcgcggacgagttcaccgatatggacgatgccgagaaggacaaggaactcggtaacgccttcaaggaactgcagcgccagattgtgcgtcgccgcatcctgaccgaggactaccgcatcgacggccgtggcctgcgcgacatccgcaccctgtccgccgaggtggacattgtgcctcgcgtgcacggttccgccctgttccagcgtggcgagacccagattctgggcgtcaccacgctgaacatgctcaagatggagcagcagatcgacgcgctgtccggtccgcagtccaagcgttacatgcacaactacgagatgccgccgtactccactggtgagaccggccgcgtcggttccccgaagcgccgcgaaatcggccacggcgccctcgccgagaaggctctcgtgccggtgctgccgagccgcgaagagttcccctacgccatccgacaggtctccgaggccatcggttccaacggttccacttcgatgggttccgtgtgcgcctccacgctgagccttttggctgccggcgtgccgctgaaggctccggttgccggcatcgccatgggcctcgtgtccggcgacgttgatggcaagcacatcttcaagaccctcaccgatattctgggtgccgaggatgccttcggcgacatggacttcaaggtggccggtacttccgagttcatcaccgccctgcagctcgacaccaagctcgacggcatccccgccgacatcctggccgccgctctgcagcaggccaaggaagcccgcgccacgattctcgaggtcatcaacgagtgcatcgacggcccggccgagatgagcgagttcgctccgcgcatcatcaccacctccgtcccggttgagaagatcggcgaagtcatcggcccgaagggcaagatgatcaaccagattcaggaagacaccggcgctgaaattgccatcgaggatgacggtaccgtcttcatctcctccgagggtggcgaggctgctgagaaggccaaggccatcatcgaccagattgccaacccgcacgtgcccgaggccggcgaaacctacaacggcaaggtcgtcaagaccacgtcgttcggcgctttcgtgaacctcacccccggcaccgacggcctgctgcacatctcccagatccgcaacctggccaacggcgagcgtattgacgctgtcgaagacgtgctcaaggaaggcgacaccgttgaggtgatcgttcagggtgtcgatgatcgcggcaagatctccctggccattcctggtttcgaggatcaggagaacaacgcccgcccgagccgtggcgatcgcgatgaccgccgtggcggccgtggccgtggtgaccgtgacgatcgccgtggcggccgtggccgtcgctccgagcgcgatgaccgtgacttcgacgatcgtgacgaccgtccgcgtcgccgtcgctccgatgacttcgaggatgattacgacgaccgtccgcgtcgccgtcgctccgatgaccgtgacttcgatcgcgatgatcgcgatgatgatcgtccgcgtcgccgtcgttctgccgaccgtgacttcgacgatcgcgatgaccgtgatgctcgcgactcccgtgacgatgatcgtccgcgtcgccgtcgctcttccgatcgcgatgaccgtggcgatcgtgatgaccgccgtggcggttcccgtggccgtggccgtggctcggaccgtaacccgcgctacgccaccgacgacaactacgacgactaccgcgccgaccgcgaagagcgtactgagcgcccgcgtcgccgcgtccgtcgcgactttgatccgttcgaggactaaatccctctcacggatcggtcgcggcatagccgctcccctcacctacgggaagcccgtagggcttcccgcttaacggttcggcattcgaggactgatcgttctctagcttctctcgggtgagaagggcttgatcgcaaaccaaaaggcttctataccgtttcattcggtatagaagcctttttggtttttcggcttcttcgcgctgcatatttcgatgttgaataaggcactcgtgctgccgccatgtacgtttagttgtcggttgacaactattcccatgcatcaagaatggcggatgatcatcgaaggtactcatgggcgttgatcactgtggcaacaacaaaggccgggcccttgtgagagcccggcctttatgccgtatggcggcggattaatccttaaaggctaatccgttgtcaatcagcgttacagaatcgccatgcacacgaagtccagaatgaacagcgcggccacagtccagatgatcgggtgaacctccttggccttgcccttgcaggtcttcacgatgcagtacatgatgaagcctccggcgatgccgtaggagatggagtaggagaaggccatgaacacggcggcgaagaacgccggaatggcttcggcgatgtcgtcccacttgacttccttcagggaagcggccatcatgcagccgacgatcaccagcacgccggcggttgcggcggacggcacggcggagacgaccggggccaggaacgcggacaaggcgaagcagatcgccacaaccacggaggtcaggccggttcggccgcctgcggcgatgccggcggaagactcgacgtaggtggtggtgttcgaggtgccgcagatggcgccgatggaggtggcgatggagtcggcgaacagggccttgtccatcttggaggagaagccgtggccgttctccagagccttctcatcctcggcggagaagatgccggtgcggcggccggtgccgatgaaagtgcccagggtgtcgaacgtatcggacatggagaaggcgaagatggtcacgatgaccagcggcagcttggtcggatcagagaacagtgccgggaagccctcggcggagaagatcgcgccgaaggtctgcggcagctgggagaaggtctcgctgatggactgcgagttggaccaggtggtcacgccgaacgggatgccgattacggtggtgatggcgatggccagcagcatgccgcccttaaccttcatcacggtgaacacaatggccagtacgaggccgatcaggaagacccacagcaccttgtcgttaaagttggccagacccggggtagccgcaacggcaccgcccttggcggcggccttcggatcgccgggagtgaacttgatcaggccgacgttcagcatgcccacgtaggccacgaacaggccgatgccgccgccgatggcgtgttgcagggactccgggatggccaggatgatcatcttgcggatcttggtgacggtgatgaggatgttgatcaggccgcacaggaacaccatgcacatggtctgctgccagctgaagccgaggccgaagcacacggtgtaggtgaagaacgcgttgaggcccatgccggcggcctgggcgtacggcacgttggcgaacaggcccatgaccagggtgccgatgatggccgcgatgatggtggccaggaacacgccgccccacggcatacccgtctgcgacaggatctgcgggttgacgacgatgatgtaagccatcgcgaagaacgtggtcaggccggccagaatctcagtcgagacggtcgtgccgttttccttcaaatggaagaacttctccatttactctctacttccttgggtttatgcggggctgcgcaccgcgtgcataatgctgcggctggccccggcgagaattgcgactcgccctgatcggcctgcccaacgcgcgtcaggcgctgcgcacccaatcagaaccgtggccgattatagcttgtggaggcaacgtgaacgggtccgggagtagactgactgccagaataattcggaacaactcaggggacacgcaggacacacccgtggaaggaaggcgcgcgatgaaaccggccgtcgaagtcagcatcacctcttggaagaagaatgtcgtcaagcccggtcaggagtacggccgcgtactgctgatgcccggcaccggctacaactgcgaccgtccgctgctctactggtcggcccaggctctggtcgaggccggctggcgaatcgaccgcatgaacgtacgcaacgcttccgacgacctgtccacggtgattccggtcctcaatcaggcgattgacggctgggtggccgccgcgcgcgagtccggcgcgggtaaagccggtgattccggggatggcgttgccgccgatgattctgctaccgtgctggccgatggcgcagctggctcgccgaaccgtgattccgacaccccgtccggccctcgcctgttgctgatcggcaagtcgctgacgacgatgacctacccacatgtggcctcacactacggtctgccgttcgtgctgctgaccccggtgctgcatcacgccgacttcgatccatccgcccgggtgattccggtgccggctgtcggcgatgatatcgtcgccgaatccgaggccccgagcgtggccgaagcaagggcgatcatccgcgcggaacaggccggccagtcgcacgccgccagctcccgatactccggcccggcaccgctgatctgcgccggcaccgccgacccgttctacgatcaagcccgcgccaacgcgctcaccccgcacgtgcacgaatacccggatgccaaccattcgatcgaggtgcccggccactggcgtcgctcgctcgactatctgaaggaagtcaccgcgtccgtagcccagtacgccgccacgctgtaatgccccgcgacacgcccgaattctgcaatgtcgctgaccatccgtaatctaatcatccgtaaaccacagaccgttggttgaagtgcgcgcgagtgcatttccgaagtttggttcgccaagccagcgcaggttgagagatataagcccgtcaagggccggcgaaggtcgcttcgcgagattatattgctctgcctgtgcgcagggcttttttgttgcccggccgaaagttccgaactccaagtcaacggccgacttaggaaggaacgccatgaagaggcccgaaaaggaagcggtagtcgctcagcttacggaagaattccgtaacgctgacgccgtctacctgaccgagtaccgcgggcttaccgttccgcagatttccgatctgcgtgaaaagctaggccgcgatacttcctacaccgtggcaaagaacacgctggcacgcatcgccgccaaggaagcgggcattgagggtctcgacgagattctctccggcccgaccgccatcaccttcgtgaagggcgacttcatcgaggctgcgaaggtcatccgtgacttcgccaaggacaacaaggctcttgtcatcaagggtgccgccgctgacggcactgtctacgatgccgagggcgccaagaagctggcagacctcaagtcccgcccgcagctgcttgccgaattcgccggcgacatcaaggcatcgatggccaaggccgcgtacctgttcaacgctctgcctaccaaggctgtgcgcacgatcgacgccctgcgcgaaaagcaggagaaggctgcctgatttacgccctcacggcatgaatcagtcgcttcgataatttaaacaataaggtttattaggcagcggatctaccacttcgtccgccgccaagattgaaaggaagccataatggctaagtacaccaacgatgagctgctggaagccttcggcgagatgaccctggtcgagctctccgagttcgtgaaggccttcgaggagaagttcgacgtcgaggctgccgctccggttgccgctgttgccgctgttgctggcgctgctgctccggctgaggaagagaaggatgagttcgacgtcatcctctccgccgtcggcgacaagaagatccaggtcatcaaggctgtccgcgccatcaccaacctcggcctggccgaggccaaggctcttgtcgacggcgctccgaaggccgtcctcgagaaggccaagaaggaagatgccgagaaggccaaggctcagctggaagaggctggcgccagcgtcgagctcaagtgatttgtgcggcataagccgcaatcacagcttttcgaggaaccccgcacctgtgtttcaggctgcggggtttccgcatactgagtagactagttgacgaggacgaggcggagaacgcgatccggcgtggaaacacaaagctggcaatgagcgaaagttgtcaattctgtgcccagtaatccgccaaaagccggtaaaagatgacacaatggcacgtagtgtggtcaaatagtgtgtccaggaaggcggtcacggtgagcgagtggacggtgaagatcaacggtgtcgaccggatcagcgtcaagccgggggagtgcgtggaaatcggccgtaagccgttacgcccccttgccgatgatggcaacacccgccttgacgtcgccgatcaaaccaaatcgatgtccaaacggcacgccatgttcacggtaaaaagcaatggcacggcctcggtccgtgatcttggatcgaccaatggatcgtatgtggtgcgggaaaatggcgatttgttgcgcttgccggccaatgccgagttcctgttgccgacgtctcccatgcgcatgcagttcggcgatgtgcctgcggacttcattcgtgtcgacgatccagtggcaaagccgctcgacctcaaggtgcctgatttgtttggctatgcggttcacgaagcaccgcaggagccggatgcggcggatatgtccgtcgacgatattcttgatttgcgggccggcgagccgaccgccatcttcagcgcggataatgttcgacgcaaggtcgacgagcttgaacttggctcgctgaatatcacgcagccagtgacgaaaaacgatgagccggccataccccgtgatctgttcgcggatgcgttggcccagcatgccgagcaggagaccgaacgcaaaaaccagcaggccatgaactccgtggcactgccgaagcagcagaccgaacctgagtcgacgattgtaacgcctgcatccaagcacagcaggatctccggtattgttccagtagatgccatcgcccatgccgttgttaagcacgctcccagcacaagcgagccggcagtggcgtcggcggcggttgttgaatccgatgtggtggctggcgcaagcaagtcagccgaaaacgttcagtccgctccgaataccaggaatgccggcgattctcagccggcggacactgtcgaacagcatgctgaagttgcccagcctgaagccgcccgggaagccgaagccgctcaatctgaaaacacccagcctgagaccgctcagccggcaaccgcccagtctgaaaccgaccagccggcagctgacgtaccggacgatcagcagcggaccgcagccgaagcatatcaagaagccaccgcagcaggcgtagcagaccagcagccggctgccgaaaccgcccagcagtcggtatccgaagcatatgatatcgactccacgggcgtacacactccggtcttcgagcccggctcggtgttcgagcgtgtggccaagggcgagctgaaagcacaggagccggcagtcgaagtcgatggcctgacctctgacgaggcaaaaaccacgcaagatttcaatgttcaattcgaagtcgcccgtcatcccgaattgctggcgttcctcgccatgaatccgtacctgtacgacgacatgtattcttggctcgccgcccgtggcgaggccgatattgacgaagccctgtctcacaacaagggctatcaggaataccgcgaagcggttggaaagtgagtcgagagatgacccagagccagactcagaaccagaatctcacggaaggtctgaatcgcatccgtcgctggcgtgaccaataccgcagcatgcagccgccatcgccgctcgaggatgtgaatcaactggccgcgaagctggagatgacccatgcccatccctccggcatcgcccagctgttcgcttccggccatgtccggttggattcgttgttccgcgacacgggtgtgcttaaggccgccgaacgccatattgggcgcgtgctggatgaccaggccgccaaacgcaggatttccggcgtggcggagttgtcgctcgtggtcggcgtggccacatggaagggcaacgcgctgccggtgctgttgtacccggtgagcgtcacgatcgagggtgatggcttgtcgaccaccattcgattcaccggtcgcgtggccctgaacgtcgcgttcgtcaatacattgcgtgagcagggggtgttcctggatgaggattccctgtttgacggtgccagctatgacagtggcactcccgaaacttccgcgatgttcgcccgtatttcgtccgaagcgtcggagcgtatctccgacttcgccatcgagcgccagattgtgctcggatgcttcatggacccctcgtcgcagatgatcagcgaaagccgacagttcatcgaccagctggagaacggccccaccggcaatgtgctgttggacgcgcttgccggcgacgaatccgcccgcaccgcgctcaaagatgccaatattccgcaatacagtcctttcgacgtagacccgcatgccgagtacgaagtcggcgatgtggacaatacggtgcgatatgccgcgtcacttgctgccaatggccatagcatcgtggtcgacggcaccttcccgaagggcaccgcggagcaggctgtggccatcgcatcgcgctgcctgatgaatggtcgttccgtgctgtacgtgcccggcgtggccgagcagaagcgtctgttcatccagacggcttccgccaatgagatgaaggcgcaggtactggatgtatccgatgaacacgccaacgccgcgcttgataagcagctgattgccgcagtcggattccagcccggagtcgccacccagcgattcgaccagctggccgacgaactcgtgggcgtgcgctcgcgcttgacccgctacttgggcgacctgcacgggggcaatgataagtggaatgtgtccgcatacgagaccattcagaatctggcccgtatctccgtgctcccgacgcaccctgccacccacgttcgacttgacgagtcaagtgccctgagcatcgccaacgatattgacacatggatcggcaagatggaacgcgccggcgagctcggcgaatacaccatcggcccggaagacaccgcatggtacaaggcgtccatcaccactgaagaacaggcagtaaccgcctaccagcgcgtggacgatttgctgcgtcgcttcctgcccgccacccgtgagcaggtggcacgcaccgtgcagacctgcggattcccggttcctcccaccacccgcgagtgggagcgtcaggttacggttttgaagaatctgcgacgagtgcttgacgtgttccagccggagattttcgagcgagacatcagctccatgatcgaggccaccaagccgaagagccagcgcaaggccgagggcacgtcgatgggattctgggagcgccgccgccacatcaaggaagccaaggatctgctgcgcgtcggcgcgcaggtcgaggacttgcacgaagcgttgaaggtagtcgccaagcaaggggagcagtggcatcagttcgtgcctcacggcggttggccggtgctgcccagcaagctcgacgagatcatctccacccaagaggcgctggtcagcaatatgaccgcgctggataccgtgctttccaccacacccgctggtggcaatctggaaaccgccgatttcgagaaggtggaagcacgcctgaaagcactgctggatgatcgcaaggcactggacaccttgccggagcgttgcctgctggagcaggaattcgcctctgccggactgaacgaactggtcgccgatctcaacgctcgccgagtgagcgtggagcaggtgcgcggcgaagtgcagctggcctggtggaccaccgtgtttgaggacattgtgcgttcgtccgccatcatctccaaccaggatggtgccgcgctgcaggccgcatccgaccgctttgcgcaggtcgatgtggagcacgtgcgctccatcggaccgatggtgtcgcaggaatccatgcgccgcctgtgcgacatgctgttctcccgcactcaggaagccaaccagatgcacaccgtgctggcagggcgcgccagtgtgtcgctgagcaggattcgccgtgatcatccggagattctggccgcggccaagccgattctggtggccgcgccgggtacgctcgccgcactcaccgagccgggtgtgctggctgatgtggcgattctcgatgcgtgcgcgcacattcccgctatcgagttgctgtccatcatcggccgcgtgcagcaggtggtggtgatcgcccactgcgcgacggtaaccagcgaaagcgtcaagcagctgatcgacacgttgcctcatatcgaggtggatgctgccccatctcgccgtgcgccgcgcctgtccgcattccttgaatccgagggatatggtcctgttcgctatgatgtggccaccgagccggctgccggtgaggtgcgattccaccgtgtggaagcgagcggtgtgccggttatgtcttctggtctggtggaatccagccagccggagattgatgaagtggtgcgtctgattacgcaacgtgccgccggttttgccgtggttccttccagctatcgacttgtggtcgtgatgttgaccgacgcattccgcacacgcttgggtgccgaattgaagtcgttggcaggcaaatccaaggcgatgggccgattcctgcgccatgtgcggttggtttccttgcgtgacgtggccggaggtcgtgccactgacgtgattctgtcgatgtgctatgcgaaaaccacgcacggacgtctgcttcagcagttcggcccgctcgaaagcacaggcggtcgcggactgttgctggatgccctggcattggcggaccacagcttggatattgtgtcggcctttggttccgaagatttggacgaagaacgactgcaccagtccggtcctcggttcctgaagaccatgttgacgtgggccgaacagcttgacgaccgtccggtgcttccgttgcgtgatgcggcaggcggcaacgtgctgttcgacgatatcgccgacaggttgcgcgcgcgaggactgaacgctgctgttgattatggattcgacaagggcgtgaagattccgctcgtggtgggattgaaggacaagccgtttgccttggccgtgcagaccgatgacgcgaactttatgtccgtgcaatccacgcgtaggcgtcatcgtttgtcggcacaggatctcatttccttgggctggaatgtgatgaccgtctggagtgtcgccgccttcgtgaaccccgataaggaagtcgaccgtatcgtcagccgtatcggtgagatctatcgcgaggttgaataaccatggcggaatactcggctacacggcgcacaccgcgcaagcacaagcgcgtggtgatgaagggcactgagcagtttgacgctgacggtgtcaaactcgagcccggagacatgcagaccgaccaacaacggcaatccgacgacgacaaacgcatcctcggcgaactgccgccgcattgggccgtttttaacgagcgcgagtaggagttggggcgcactctgtgcgccccaacactgtgttttccgcagccgacaggctgcggaaaacacagtatcggccgaaggccgattccgcttcctaccgcacaacggccataatcgctccggcctgttgcagctccataaccttggccgcggcctccggcggcattgcgaacgacaccagtcggtcgttgcttcccaatgcgccagtcgtatccggtttgtcgacattcatcaccgtggcgttctcggccagcgtgcaatcggcaccttcgcaaccgacggcggaaaccagtctcacctgatcgccggccaatacatcgtcgacgctactggccaagcggacttcaatcaccgtagtgccggtcggtgctacgggcgcatctctggccatatgcgtggaaatgggatcggctgcttcgatatcgatttgcgccaccttgcccaccacatcctcaatattgcacgcccaagacgggcctatcgcagataccggcatatcagccaactgaacgtcggcggccagaataatgtcaccccgtcgaatcgagcgggcggccaccaccatcggctcggtctccaccacggccaatacggcttcaagcccaaacagcactgcgagtcccacgcacaacgcagcagtgagtcggcgcaaggcatccgccatgcgccgtcgccgcaatgagccgcgcgcaggcggcttaataaacgaaaaggtcaccatgcaaccatggtgacctgaagtttttcgtaagcgcaagccaaatcgacctatgtggttctagcttgccaagttatccacaacgcttcaaacccgtgcaacagacagtgcccgtagtgccaatatccgcggcataccgccgtcgacaccgtcgtttacagaggaaaagcgggtgtacagaccttacttgccggatttgtcggtgcggtagaagccgtgacccttgaactcaatcggcacggcggaatacaccttgcgcacctgctcctgcgagcacttggggcacacggtaatcgggtcgtcattgaacgactgctgttcggtgaagtcatagccgcagttcttgcaacggtaatgataggtaggcaacggattcctccaacaaagtcatatttctcgcggatggcccaaacgccatgccacgcaaccgttcatatcctagtcgccgccctgacacattggcgttacggtcttactagccagcttgctgttgccactctggttccatcggccagtgtgcgtggctggttggtcagtctggcttgcgccgagtatcttggccggccggccagctcaacaggcccgatgagctaagccgccggtatccctccggcgtcagcactccgtcggccggcacatcatgtggttcggccggcaaatcaatgtccaacacctcccacggccagcacaccgcaatcaggggacatgcgggcttgcggcgagccaaggcccggtcataccagccggctccacgccccagacgattgccctgcgggtccactgccaaagccggagcgatgaccagatcggccttctccaacgcttcgggcggtagaactgcgccagttggctcatcgggtctgtgatggacggtgctgggagagctgcagctaccggcattgttcgcgccacccactgcatccatcgagcgcaatgattccaatgaatccagcacactccagccaatttccaacccagaccccaaccttggcaccaacacgtggcagccatgagcccgcagccatcgcaacagtggccgggtttcgatttccgaacccatcgacacatatgccgccactgtgggaccatcctgaatcatgtgtgctgggaaccgtcgcaccagcaattcaccggccgctccgcgttcttccgctggaacgcgcttgcgccgagacagtatatggtggcgcagcgtcgctttatccgtcttctctgttttctctgtgccgctgtagtcgctgccgatattcatgccactgcccacttcgctcataccgcacaatctagtgtttccatcgtaaaacgaaagtggccacggtagcggcgcaagaccttcatatggctacaataaaggccgtgtcagttttccagtcgattaaagaggcgttcaagctggaccaccagatccgcccgccacgtctcacccatcccggttttccgatagtcctgcgccccctgaccatggatgatgaggacggctggaacgaagtgcgctggcgcaacaacgactggctggcaccttgggaatccggtgacccgatgcatggcggctccatcacattcaatcaatgggtgcagcggcagcgccgtaacgagcagcatggcgtcggcgtgatcttcgccatcgaataccagatgcgtatcgtcggccagatttcgttgggagccatcgtgtatggtgccatgcgtaccggcgtggttggttattgggtcgatcaacggtgcgccggccgcggattcgcgccaatggcactggccatgcttgccgattgggcgctcggagacccattcgggcccgcgttgcatcggctggaaatcgccattctgccggataatgcgcgttctttggctgtggtgcgtaaggtcggagcccatcatgagggactgcgcgagcggtatatgtatgtcaatggccagtggcgtgaccacgtaacgtttgcgctgttggctgaagatatggggcaagggttcgccgctagactcgccgccgccggttccagataagcgtcgaccggaagaattccgctccgacacgcccggacggaaagccccagttcgtcggcacgtctcctatccttgactctatgggttatgagtcactgagcactgtcgtcgtgctggtgattgtggcgattattatcgttgtatggctgcccgtacgtacggccaacggcatgaaacgtgtggacgagcaccggcaggatcgttattcgccttccctgcatatcgttgatgcagagaacggcagacgattcggagacatcaagccgcataaggcgaaaggggcagcaatgccagcatcaacaccgtcagcgaggctgacatctgagcacatcgcccatgtgcgggaactgcgccgcgcggccatccgccgccggcagattctcgccgtatgcctgcttgccataaccgtgttggtgtttgccgtatcgttccccctgcatttcagtccgctgcttgctcttattccgttcgtgctgttgctgctggtgctggtgctgggagccaatgcctcacgccaggcccggcaatgggagcgcaaggtggtccgctacgagcgggctcatagcggtacgggctggtccaagaaaccgtctgccgagtccaaggacagcaagcgtgtgaacaaggccgaaccggttgcggccgtaactgcgcctgccgagaagcctgccgagcagattgaggatgctgccaccgaggtcatggaacagcggcagattcgccgcgcgttacgcgatgccgagattgagcaggccaaggccaaggcgttgcgtcagtccgccgccgcatatcaggccgcggaagagcacgccaaacagtctgagaagtctgatattgcacagtccgccgccgataagcctgccgccgagccgtctgctatggtcgatgaatccgccgaccgtaagtccgctgccgaaaccagcgaatcttccgccacacctgatgcctccgttcgcacagacaagtcgattgagtcggacaagtccgtcgcccctcgagttgaaccatcgcttacggtgcgtgacgagcgcgatgagcgcgacgatgccgctgccgctgccgatgccacgtcggaactggtcagcgtacgccctgcccgagcactggacgtcttcgatatgtccacctcgcaggatctcatctccttcactttgggtggggaacataacgccgacaacgctccggaaagcttggagatcaagtcgacccgtcaggtgtccaaggcggaacctgtcgaacccgcagtggcggaaaagttgattgacgaggcccgagccgtcaaggccgcggacgacgccaaggctgtcagcgccggaaacgctgtagacactgagccggagcagcgcgatgatgccgatacggacgccgatgacgaggctgcaaacgccgcccagcgagccgcattccacgaatccgaggagcgtgccgacgtcgaagcgccagcggcgaccaccgattcgttgggcgcaggcctggactccattcttgcccgccgcggcaactgagcgttgcgattcgacgattttctctcacagcgttagcactcgagttggcagagtgctaataatcgcgctacgatgtgtcctagcgcaaagggacaacgcaagtgatcgtcagcctcttgaggcgttctggcgcggcattatcgaactacaagtagatacgaggtgacccacagtgtcgattaagctcacaccgttggaagacaagatcatcgtcaagcaggccgaggcccagacccagaccgcttccggtctgtacattccggacaatgccaaggagaagcctcagcagggtgaagtcctggccgttggcccgggccgtcgtgacgacaagggcgagcgcatcccgatggatgtcaaggtcggcgacaaggtgctgtactccaagtacggcggcaccgaagtccactacgagggtgaggactacctcatcgtcggcgcccgcgacattctcgccatcctcggctgattagtcgcctagcgaacttcaacaaccccgactgttcccgcggatagtcggggttttctcttgctaggcggaaaggggctccccctcagagaggggagccgaaagctgctcccaccaaacgcccagccatgcctgctatgcataaaggtgcatgcgcgcaacgtagttgagttcggcgttgcaccgcatctacactgggtaacggattggggtccctatggaagaggctcagttggcgacttggccgagcggcttaagacattttgcacaagacggcagtagatcgacggtatgttgttttttccgtgtcgcaggttcgtggtgtcgtcgcgctgtgccaatggttgtctctctaccgacgctgagtgccgtggcatgaggccagcgtcggcagtgggccacggaatggcgatgtgctgatgctgagccgcgttggcgtcgttatagggccagtttttggaccattgccgacggcaaatcggcgttttgtgtcggcgacggtccaatacctggcggtctgctgacgataagtgccgtcatcgtcggcagaccgccaggtattgtccccgtgccgacgtaaaaagccctgccatcgtcgtcaccgagccatcttgtgactcactgacggcggcagcagggcggaagaggccgaaatcatgcgcgcggtgcggtctcacacctcgaatccggcctccaccagcgcgtgatcgatgtcgcgaatcaaatcgtccgtatcctccagacccacggccagacggaagaagccgcggtggaactcaggcgggtacaggtactggcgctcgtcatcctcgccgaggaacacgatcagcgattcgtcatggccgagcgagacggccgacgtaatcacattgagcttggaaacgaaccggttgtgcccgtcatgattggtgtcgaggccgaacgacagcacgccgccgaacccggagtccgggcgggccagctggctgaccgccacctcgtggtgcgggtgcgattccagaccggggtacgccacgaaacgcaccacatccagcgattcgagatgcttggcaatcgccaaggccaaggcgttgtgctggcggatgcgcagtggcagcgtcaccgagccgcgattgatcagccaggcattgaacggcgagatgatgccgccgaagttcacctgcgcggtgaagcggatctggtccgtgcgcgccttggtggtggcgatcgagccgcccagcgcgtcgccatggccgttgatgtatttggtgagcgattcgatgacgatatccgcgccgagattgagcgggcgcacgttgtacggcgtgttgaaggtgttgtccaccgaaaccagaatgtccgggttcgcttcgtgggccagtttggcgatggtggcgatgtccgagaccttgagcgtcgggttcgccggtgtctcgatatgcaccagcttggtgttggggcgaagcgccgcgcgtacgttctcgggatcggaggtatccaggatggaggtttcgatgccgtacttctccggcagaatctggttcaacaggcggtaggcggcgatataggtggtgtcggagaagatcgcgtggtcgcctcggttgaggaacgtggtgaacgtggcggccagcgcggccacgccggaagcgagcaccaccgcatcctcggcaccttcaagacgggccagcttttcttccagatagcgctggttcggatgcccgttgcgcgtgtagaggttcacgtccgaactggaccagttgatgtccgaggggtcgtagggcagcgcgtaggcgttcgccagcgtgatggggcgacggatcgcgccggtttcggcgtcgaccccgttaccgaggtgaatggccagcgtgccgaatccgagcggctggtcgtcgaatgattgtccgtgatgtacaagatcagaagccatgcgcccagcatgccagcatgcgccgtgccgcgcaaacaggcgacatcgctcgaaaaccgcgccattgcaaggttctagagcaccatataagaaaaaatgattgggtgaagtgcggggtgcagccttggtcggggctgtttgcagggccgaagcgggccctgaaaacacgctgtgagacacgccgataaaaccgcagaattccgcggtaaaacaaggttcgcgtagggggccgatttgcatacctggaaaatctgtggttatatagccaagttgcctgttgaggtcaaacaccgcggcgggaaacagactggcggatttcccaagcggtcaaagggagctgactgtaaatcagccgcttcgtgcttcagtggttcgaatccactatccgccacgccccgatagctcagtggtagagcacttccttggtaaggaagaggtcgtgagtccaattctcactcggggctctctggcggggtagctcagctggctagagcgtacgactcataatcgtaaggtcaagagttcgagcctcttcctcgctacaaatcgcgcccgctaaccggtgggcgcgcactatacctaagaacacagaggtgaatgacaatggctaagagcgccgacatccgtccgggcatcacgctggcctgcaccgagtgcaaggagcgtaactacattacgactaagaaccgtcgtaacacgcccgaccgtcttgagctcaagaagttctgcccgcgctgcggcaagcagaccgtgcaccgcgagactcgttgatcgcaagtatcacagctttacaaaacccggcccattcggccgggtttttgcgtattgcctccggaggcgagtggcagggtgcggaatcagtatccgcatcgcgtgagaaacggcagaaatcccgcgtctgaacgaacccctcgcgggcgttctgtcgtttcgggccgccaaaacggcagaaatcccgcgccaccttcgttcagacgcgggcgttctgccgtttcagccgatgattgcctcgatatcgcacctgcgccactaagatagtaagccatgacaagctttgcagacatcaccaccatgggcgtgggcggccccatcgcccatttcatcgagccgaccacgcgcgtgggactcatcgaagccgtggaggaagccgattccaaaggcctgcccttggtcgtcgtcggtggcggctccaacctgcttgtttccgataagccttttgacggcgtggtggttcgagacgcccgacgcctcatcactgtgccggacgaggctgcaccggtagagggcgaggatcgcaccgtgcatgtcaatgccgaggccggtgccaattgggatgatttcgtggccttcaccgtagagctcgggctcgagggcgtcgagggactgtccggcattcccggcacagtcggcgcttccgtggtgcagaacatcggtgcctacgggcaggaagtcgccacttcggtcgaatcggtggaagtctgggatcgagacaccaaaacaacgcgcgacctcacacccgccgatcttcgattcggctatcgatactccgcactgaagaccagcatgtacgccggccccggccggccggccggccgattcttcccgacgccacgttacgtggtgctttccgtcacctttgccctgacccactcggccgaaggcacggtaggttacggacagcttgccaaagcgcttggcgtcgaagtgggcgaccgtatggccaccgccgacatccgcaaagccgtgctcgcagtacgtgccgccaagggcatgctcgaggaccctactcgctacgccttgcctgacatggccaccgccaagcgcgaggccaatatcctgaccgatctggagcgtctggcctccctcaatgaggccgccggcattcccgttggcgatgacggtctgcctgctcccgactacaatcgccacagctgcggctcgttctttatgaatccgattctgaccgccgaccaagcggcggccctgcccgaagatgcgccgaagttcgacgcgactctgcctgacggcactcccggcaccaagacgtccgccgcctggctcatcgaccatgccggctgccataagggatataaggtcgatgcggacgcgccggccagtctatccacgcagcacacgctggccttgaccaatcgtgggggagcgagcgcggccgatatcgcagctttggcgcgtgcggttcagcaggcagtcaagagcgcgttcggagtggacttggtgcccgaaccggtctgcgtcggtgtgctgtaatcgcgctattgattgatggagtgggttattaatcccatatattgcggactctgagtcttattaatagacaagacacgcgggctcttctatactcgattgtcggtattgtgcgcattcggtgcgcaaacaacagagaaaaaagaagagcactatgcaactgttccgtacaaaatccgtcgaacagaccattgccgaaaccggtgaagagggccgcaagctcaagcgcaacctgacttggtgggatctgtcaatcatgggcgtggccgtagccgtgggcgccggcatcttctcggtgggcgcgcaggccgccgccttccacgccggcccggccgtgatcatcagcttcctgatcgccggcatcgtgtgcggcgcagccgtgatgtgctacgccgaattcgcttcgatgattccggtggccggctccgcctacaccttcacctacaccacggtcggcgagatcatggcctggatcatcggctgggatctgattctggaaatgctgatggccggctccgtgatttccaagtattggggcgtatacctcaacgatttcatgcgcctgatgggctggaacgccaacaccaacctgacgttcggctccttccatatcgatatcgccccgattatcatcgtggcgttctttaccacgctgctcgtattcggcaccaagatcggcgcccgcgtggacggtgctatgaccgtgctcaagatcgccatcgtgttctttgtggtgatcgtcggcttcttctacgtcaaggcctccaacttcaccccgttcattccgccgagccagccggcctccaccgtggaaggctcctccgccgtcaccggcgtgatgacccagccgctgtggcagttcgccaccggcatgaccccatccgtgtacggcgttcccggcatcctctcgggcgcggcgctcgtgttcttcgcgttcatcggattcgacgtggtggccaccgcctctgaggagaccaagaacccgcacaagaacgtgccgctcggcatcggcgtgggcatgctgctcatcattgtcatgtacatgctcgtggccgtggtgaccaccggcatggtctcctatgccgatctcgccaagcaagacagcccctcgctggccaccgccttcgaactggtgggcgccgactgggccgccaagatcatcagcttcggcatcgtgctgggcctggccaccgtggttatggtgctgttgctcggcctgacccgtatcgttttcgccatgagccgcgatggtctgctgccgcgcggcctgtccaagaccggcaagcatggcaccccggccgctctgcagatcgtcgtcggcgcggtggtggcgcttgtggccgccttcttcgacatcggcgtgctctccgacatggtcaacatcggcaccctgtccgccttcacgctggtggccatctccatcccgattatgcgcaagaagcgccccgacctgccgcgcgccttcaagatgcccggcagcccgtggattccgatcctcatcgccgtggccaacttctggttgatgctcaacctgtccgtgctcacctggattcgtttcgtggtgtggctcgtggtcggcttcgccatctacttcggctacggctactggcatgcgcgcctcggcaagggcgacctgaccgaaacgctgtccgccgaaaccgataaggccgttaacggctgagagcgaggagcgtcccaacaggcgcgtacccttgtatcagtatttgttaaggaggattccatgccatatgtaatcgctcagccttgcgtggatgtcaaggacaaggcttgcgtggacgagtgccccgtcgactgcatttacgagggttcccgctcgctgtacatcaaccccaacgagtgcgtcgactgcggtgcatgcgaaccggtgtgccccaccgaggccatcttctatgaggatgatctgccggacgagtgggcttggtacaaggatgccgctgtcaacttcttcgctgaagtcggcgatttgggcggcgcttccgccaatggtccaatcggcaaagacccggaacaggtcgccgcgctgccgccgcagaaccagtaagctgatttgcggataagcgctgcacacagcgcatagttcggattgaaccctcggtctatcacggccgagggttcgtcgtatcttaggaacataccgtccaagaaaggggttctcatgggcttccacgcatattcgtcgccatacgactggtctcgtatcgccggctttaaagccaccgccaaaaccgtgccgggtggcatgatcgacctgtccgtaggctcgcctgtggacccggtgccgagcagtgtccagcaggcgctggttgccggcgcagacgcccccaacgcccatggatacccggtcaccgccggcaccgccgaccttaaggccgctatcgatacatggttccgcgaactgcgcggggtggatctgaaatccatcaacgctgccgccgtacccaccgtgggttccaaggaggccgtggcgctgatggccagcctgctgcaccttggcgaaggcgatgtggtcgtccaaccggctgtctcctacccgacttacgaaatcggtacccaacttgccggcgccaccgtggtcaaagtcgatgatgtgaccgacgtcgattcctgggtgaatattccgaacgtcaaggccatctggatcaactcgccgtgtaatccctccggcgaggtcatctccgctgactggctgaccgacatcgtggctgctgcccgtcgcatcggtgccgtggtgctctccgacgaatgctatgcgttaatggactggcgttcggtgcgccgcaatacagccgcgtcctctgcgcctgccgcgtctgcatctgctgcgtctgtgcctgccgcaccggtggccgaatccaacgagcccgcctccgataccgcattcagtctctccgccacgccatgtgccctgaatccacatgtgtgtgaaggttcggcagctggcattctggtgctctactcgctgtccaagcagtccaacatggccggctaccgtacggctctaattgccggcgattaccggctggtcaaggaaatggccgaataccgcaagcagatcggccagattatccctggcccagtgcaggccgccatggccgcaggtctgaaggacacagccgctgtgcacgagcaatgggggcgttaccgtcgccgcctatccgcgctggttgacgcactgaaggcatatggctattcggcacaaatgccctccggcgcgctgtacgtatgggtcaaggccaggtccggcgactgctgggccgatatggccgagctcgccaagatcggcatcatccccagccccggcgaattctacggcgctcccgcctacctgcgtttctccgccaccgccaccgacgaggccatccgctccgcctgcgaacgtctcacggcgtaatgagatcgtaagtggcgttgagccgttcacgccccaaactgggcggccttgctgccaaatttgcggcgcacagcgtccagtgcggcctcggcatcatgcaaacgcgcctgtgaggtctggccgcgggcattgtcggcctcttcgagcatgtcatccagtgaaggctgcacggccgtagccgccgccttactgagcgaagacgtgctcataccggccaagcgaatagttttgggcaggggagtggcagactccgccgaggccggtagccccagcatgactttcagctgccgcacgcattccgggtacagcacgccggccgtatcggtcggccgctccatcgtaaaagaccgggtctgatagctcaggtcggcgaaccgcaacttcaccgtcagcgtgcgcgccaccagccccttgcgccgcagcgtgctggttacttcgtcgcaggccgaacgcagtagcccacacaccacgcgcatatcgcgtgtatcctcggccaaggtttcctcggacccaatggatttctcctcgcgtaccgtggtaatttcgcgggaatccaacccgtgcgaggccgcccataatccacgtgccgcagccggggagccagtggcacgagtcaatgcagcctcatccagctgagccaattcagccaccgaatgcacgccccaagcattaagccgcttctccaaagacggcccgattcccggaataccacgcaatggcatcatctgcacgaattcggccgagcgggccgcgggaatcagcagcatgccgtccggcttggcattggtcgaggccattttggacaccagtttgttacaggcgatacccactgaacacgtcacgtggaagcgctcggccacctgagcgcgaatccacgcgccgatcgcgctcggccgcccccactccagcagtgcggcggacacatccatatagccctcgtccaccgaaacctgctcgaaccggtcggtgacggtcaaaaacacctcatgcatgattcggtgcgacatcatgcggtaatacgccatatccactggcagaaaaatgccgttcgggcacaaccgatgggcgcgcgcggccggcatcgccgaattgatgccgtatttccgggcttcgtagctcgcggcggacaccaccgcgcgcggcccggtgccgatgattaccggcttgcctttgagcccggggttgcgcgccacctccaatgaggcatagaaggcatccatgtcgatatgcagcacggtgcatccggtctcgtcgtggccccaatcgcgtttggcggcctcaagtctcggtgcggtgctcatgccaccattgtaggaatgccgaacgaggtcatgctcactatgtggcgcgcatgacgcggcgctcattgtcataatgccgaatatcgccggaattccaagggtttacgcactgtgcggctgtttcgcatggtgggtgcgattccacggaatcgtccacattgcgtcactgtccgtaacgccttccaagtcaatgcgcgctgtcccggctctccgagtagcgtaaacctcatgaagaaggcagtggtcggtatcctcaaccgtgttcccgtggttcttatcgtgattggtgaggcactggtgatttatttggctacggccgtcgccaaacttgcgttcacccagctcgatccgctgtactcggtgtggtatcgcgtgggattcatggcggtgctgttgctgctgtggcgcaggccctggaacaaggcgaagcgagcgcaactgtttcaccgcgacgcccgcagctgggggctggtcgtactgctcggctgctcgctggtgctgatgaataccctgttttatgtggccatcagcaatatggatatgggcattgccgtgtctatcgaatttttgggaccgctttcggtggcggtgattaccggcaaaagctggcgcgagcgggtcggtatcggtatcgcggcggtcggtgtggtgctgttagctggcatatcattggccaatccgtccggcaatggcacgtttttgtatggtctgattgcgattttgatcggcgggtcgatgtggggcatgtatatcatcaccggccggcgcgtggcggctggcggcaattcgctggataatctgtgcatcgccgtgaccatcggctggctggtccagtccctgttccttggcgtgccggctgtggctcatgtggttcaccccaaggccgatgccacgtgggcgcttgagcccggcggctcgctgaagctgctggctctgctgtttgtgatttccctgatggcctcgttcattccctatgtggtggagcagatcacgctgcgacgcaccacatccggcgcgttttcggtaatgcaatccatcaatcccgccatggcggtggccgtgggactggcgttcggcgagattcccagcgttggtgaaatcgtcggtgtggcgttggtgatttgcgcggttatcgttacgttctccggcgacgccgcacccgcggacgttcaataatgtgtcgttcggcacgccgtatccgcaggacgtggtacagtaatttgctgttgcgcattattgcgtaacgtggagtcatgcctgagtggccgataggggcaccctgctaaggtgttagtcgtgtaaacggctcgagggttcgaatccctctgactccgccgattaaggttccgggtgaaagctcggaacttttttgttttccggaaactccgggttaagtaactcctgaaataaccgaggacgggcggtctccgcttgtggtaagcggagtcggaggtacgccattgtccgtccgcctccaaaccgccattttagtgggcgaacgagtgcggcacgtcgggaaaagtccgagcgacgaaagaaaaatgtccactaagtgagacttttgcgtggtgttcgtgaatggtgattgaagattaaccggtttatatattgcttgtccaatcgcttgctcatcgcctccctccccgcagtacttgaccgagatgggcggtaccctagagagagaagaagagttccgaagggcgggcaaagatgagccatatcgctgggcaggggcaacatcgctccaactcgacacgaaccaaccgtgcggcgctgattatcgtgttcgtgatcgtgctcgccgttgcgctgggcatcggcgcatggttcgcaacccatcgcacggacggcaatggccccgcacacgccggagtgtcggacgtcgcgttgaataaagcgaagaacacgcccaaaccggtgaccgaacatcacggcaattcaccggattgcccggatacggactgcatcgccatgctggtcaacggcgatttgttgttccatgagggattgtggagccatttccaaggcccgaaccccaacgccacggatggcaccgccttcaacttcgacccgctgttcgcgccgatgaagcagtacattcaggcttcggacatcgccgtgtgcgaattcgaaaccccgatcgcccagcgcggcggcccatatgccgcgtacccgatcttcaacattccgccggaagtggcggatgccgcccgcaacgtgggatacaacgcctgcacacacgccaccaaccattcctgggatcagggggcggatggcatcgcccgtctgtgggacacgcttgaggccaatggcatcgcccagaccggctcgtacaaaaccgaagccgactccaccaaaccgttggtcatcgattccccgaccggcggcggcaagctgggtctggtcaccggcacggtctccctcaacggcatgaccgccgacgaggactggcaggtggatcgtctgcgcgaagacggcgacccgaatcacgacagcgacatccagcgcgcggtagacaaggccaacaaggcccgcgagcaaggtgccgatgtggtggccatcgccatgcactcggtgcaggaataccttgattacgccgattcctggcagatttcggaagcccatgagcttgccgacactggtgccttcgacgttatttacggtgccggttgccattgtgcgcagcccatcgagaactataacggcacgtggattatctacggtctgggcaacgccgtcaccgagtcggcgaacacgccggaaaccttggtcaacaatcagggtgtgaccgcacgcatccagttcgccggcaagaagggcgtcaaggggtcgtggcgcgtcaaccgcatcgattgggtgcccaccgccaacgtgcatcaaggcaactaccaatggtgcccgatatccagcgaccatcccataggcacatgttgggacgaagcctacgacgctcagatacgccaacgcatctgggatgtcatctattcgatgggcgcggaccagaacgtcgtcaaggaatggaacatcacgcaggagcaggcggcaaagcaatagttgctcggcttggtctcaaggaggggaagccgcaaggtgacgcttttcccgccggcctcctaatgtggagcccatgaccgagatttacgaaacccaaagcgaacgcaccgatctgcccctcgtcgtgatgccgtccgtgcttgactcgatgatcgagcccatcaaggcccagttccccgcgctccacgacgttgcccgcgtgcgtatgttcgaggaattcacgtccgacgaggcgaccatagccgagcgtctgaaggatgccgacgccctgctggtgggcggctaccacatttcggacgatctgctgcgcaccatcagcgggcaggggcacgtcaagtgcatcgtgttctgcggtaccggcgtcgccagctacctcaatctcgataaggcgcgcgagctgaagatccgcgtctgcaacgccgaacattatggcgatcacgccgtggccgagcacaccttcgcccttctgttcgagctcatccgccgcgttggccaactcgataaggacgtcaaggccggcaactgggcgtgggccagcggcgatggactgcaactcgccggccgtcgcatgggcatcatcggactgggcggcatcggctccaccgtggccggcatcgcccgcgccctcggcatggaggtcgccgcatggaattcgcatgtgccgcccgagcatttcgaacgctccggtgccactccggtcgacgatctcaacaagctcatcgaaaccagcgacgtcatctccgtccatctgccgctgaacaacgccacgcgcggcatcgtcaccgccgagaaccttgcgcatgtgaagcccggcaccctgttcatcaacaccgcccgctccgaagtcatcgaatccggtgcgctgcttgcccgactgcaaaagggcgatgttcccgccgcactcgacgtgttcgaccatgagccgctgaccgccgacgacgccatctgccatgtgcccggcatcgtcctgaccccgcacgtcggctggcgtgccgacggcgcgttcaaggagctcacccgccagatgatcgcctgcctgaccgcctacttcgccggcgaagactataacgtcgtcgtctccgaacgctgatagccctgcctagcctcgcgctcaatcgaacacccagccagtcgaccaccggaacacgctcatgcagacgattctcaacacgcccgacgatcctgcccacgattcgctcgtcgaaaaaaagtccgaatttatcggcgacgccgcccatgtcgatacgctcgacgaggcgctcgcgttcgtggctgcgatccgtgagcagcatccgaaagcccgacacgtggcgtatgccgccgtgtgcggaggcgcggatgggcgactgtccgaacgcatgagcgatgacggcgagccgtccggtaccgccggcaagccgattctcgacgtactcaagcagtcgggcaccaccgattgcgtggttgccgtcaccagatatttcggtggtattctgctgggctccggtgggctggtccgcgcgtactcatccgccgcatcattggcgatgaaagccgcccgcgccgcccgcatcatgaccgccaagcgataccgggttcgcctcgaatacccgcagttggcccgattccagcagatcctggcgcagcttggtggcagtcaggaggatgaatcgtatgcggtgaacgtcgagttgaccgcggtggtgccgcagaatgattgcgcgcgattcgaggagcgtgtgcgggaagcgttcaatgccgctgtggtgccggctccgattgacatggtcaacattccggttccgctcgcgtgacgcctgtatgactaagctgggcatcatgaccgacgagaacaccaccagccagcagacccagcccaccgaggccgcaaccgaggccgcggccgagactgcaaccgacacggacgcccagcagcaggaccaaggcgcgcagtccgcagccgagtccgccgctccggtggatttcgaaccgctgaccgctacatacgagcgtctgcgccattccaccgacccggccgaactgtccgaattcgcccgtcggccgttgcctgaccgtgccgatcaggcggcgttctcccgcgccaccgcacttttggaggctgtggccggcaacccgcacaccccggtggccgatcgtgtgttcctcgccgacaccatgccgttcccgaacgtattggtcaaactctccgaagaccccgaaccgtccgtgcgtcaagccgtggccgccaacggggacgacaagaattggctggtcggccgtctgaccaaggacccggtgcctgcggtccgggatacggcgttgaaaaacaagcgcaccagctggaagatgcggcttgagggtgcgcaggaccccactgcggatgcggagacattggatttcttgggcgtacttggcaccgaatccgaagagggagcaccggcggtgctttcttcgatggtccgccgtgccgtggcactgaaccccaatacgtccgaagcgatgcttgccaaattggccaacgacccctcggccgaggtgcggcacgccgtggaaagccgccgctaagcacactattgctgtgttttgccgcgcaaatttggccggcaatcaccccctgtccaccattgtgagcgctcacatctcactatgtgagggtaaaaagtacataatttggcggaatcatggcatttttcttacggtgtggcgcaatcaaacggcgttagactggggctatgagtgagattaccgagagtgaagagcgtctggcccgtccgttgattcgactggccaagttggtcggtgtcggcacgagttatttgggcatgagccatgactaccacgagatagacgatgacgtcctgatcgaggtgctggcagcgctgggcatcgacgcctccagcgagagcgcccaactcatcgccatccgacgcattctgaacgagcgttacgcccgattggtggcacccaccgtgctgcatatcgccggtagcgaggaccgggtgctggtgaacaccggtattctggacgtgccttcggcgagcatcacgctggagaatggcgagccatatcaaggcaccattgaagttggtcctggagatggatcccaggcctacgacttggatggtacgttcatttcgaatgcggctgtggtcattcccgccgatctgccgattggttaccatacgctgcacgtcaaggtcgccgaccgtgtgcaagacgccactttgatcagtgcacctgatcgcgtcgatctgcttgacccgatgaagggcggcagtctgtggggctggatggcccagctgtactcgattcgctcctccaactcctggggcgtgggcgattacgaggatctgaagaccatgctggtggacgccaagcagaagaccggtgccgacttcgtgctcattaatccggtgcatgccgccgagccggtgtccccgctcaccccgtcgccgtatctgccggtaagccgtcgcctgatcaacttcacgtacatccgtcctgaggcgatcgccgaatatgccacgctcagcgagggcgacaagaatgccgtcgacggactgcatgccgacaccgaaccgctgaacggtgattcccagctcatcgaccgtgacgccatgtggcgcagcaagatgcacgccctgtggattatcttcaaggccggccgtaccgccgaacgccaaagcgtattcgaccaattcaaggcggactgtggttccgacttggaggcgtatgccacgtggtgcctgtgctacgacaagtggggggcgcccaacggcgaggagggcaactgggagcgcaagttcaatcgcaactccccggaaatcgccaatctgcgcaagcagtacccggacactttggacttctaccgctggctggaatggattgccgccgagcagctgtcctccgcccaacaggcagccaaggacgccggcatgcatatcggcatcatgtccgatatggccgtcggcgtgcacccctccggcgctgacgtgtggtggaatcccgagcgcttcgccaagggagccacggtcggcgcaccgccggacatgttcaaccagcaaggccagaactggagccagccgccgctgagcccgatcaatctggagaccaccggctacgaggcctaccgcaatatggtgcatggcatgttcgcccgtgccggtgcggtgcgcatcgatcacatccttggtctgttccgcctgtggtggattcccgagaaccgttcggctatggatggcgcttacgtgtactacgactcagacatcatgctgggcgttctggccatcgaggcctctcgtgccggcggcgtggtcgtaggtgaggacctcggcgtggtgccggaccatgtggccgattccctgtcgagccacggtattctcggttgcgccgttgaatggttcgagcagtgcgacggcgtgttccgcgccccctcccagtggcgtccgtatgcattggcctccgtgaatacgcacgatttgccgccggccgccggttacctggaatacgagcacgtcaagattcgtgagcgtctgggcttgctgaccggcccggccgaggaattcgaagcctccgccaaggccgagcaggatgcgatgctggccatgctggtcgagcagggttatcttgatgccgactttgccgaacatcgtgaggatcacgaggcggatatcgtcgacgcgctgtaccgcgcactgaagggttcgccgtgcaagctgctcgccgcctcgatcaccgacgcggtgggggagaagcgtgcgcagaaccagccgggcaccaacaacgaatacccgaactggcgcatcccactggccgacgccaagggcaacgtggtaccgctcgaaaccctcttcgacacccccggtgcccaacgcttcgcccaaatcttcaattcctgacccgctttacctccctctgacgagccgagtcgttaagcggacagtccagtggactgtccgtagacgaggcctgaaagaagcgatagctgagagaaggcagggaattgcctcaccgtaggtgagtcggttagccgaagtgggtgggagagaaaccataaataggggaagagaagccataaacccaatggagtgtccccagttgccctatgtcaagcccggcgatatactagtggattgttgtgtttccctaaggggtccttcaaagcgctatcccactcgccatcgaggactttcagggagcccacggataatgaggttcgacgcctcttggatgcggccctgaccaagccacaccaagcagctgagacccggaacacaatatagaaaaggtaatccagtgaaaactttcactccgaagccagctgatctgactcatgactggtacgtcatcgacgccaccgacgtggtgctcggccgtctcgccacccaggctgcaatcctgctgcgcggcaagaacaagccgacctacgctccgcacgccgattccggcaaccacgtgatcatcatcaatgccgacaagattgctctgactggcaacaagatgggcaaggagctctactcgcactccggccgtcccggtggtctgcgtcgtgactcctacgccgagctgctcgagaagaaccccgagcgcatcatcaagaacgctgtcaagggcatgctgccgaagaaccgtctggccaaggtgcagctcgaccgcctgcgtatcttccgtggcgccgagcacccgcacaccccgcagaagccccaggtcttcgagatcgcccaggtctcgcagcaggccaagtgaaacctgagaggagataagaatcatggctgaaaacaccaacgactcccaggttgtcgagaccgaagaggagctcaccaactacaccaccgagaccaacgctggcgctggcaccggcacctccgcgattgagccgggctacggcaccggtcgccgcaaggaggctgtcgcccgtgtccgtctggttccgggtgacggcaagtggaccatcaacggccgcactctggaggagtacttcccctccaagctgctgcagcgtgaggtcaactccccgatcgttctgctcaagctcgaaggcaagttcgacgctatcgtcctcgttgacggcggcggcaccaccggccaggccggcgccatccgcctcggcgttgcccgcgctctgaacgccatcgatcgtgatgccaaccgcgccgccctgaagaaggctggcttcctgacccgcgacgctcgcgtcgtggagcgcaagaaggctggtctgcacaaggcacgtcgcgccccgcagttctccaagcgttaatttcgcttgtcctgtaccgagcatacaaaggctctccgcggaattccgcggagagcctttgtgtttgtgtcgcgctgtcttgagtgtgactcacacctgcttcatcagcgtgatgctcagcgccggcatggtccagacattgtcgtcgacgggagtgtccggtgtatcatccacaggggcatcgggcatatcagctgatacctcatcccgaggcgcggacgaggtgccgtttgcggcgtgatctgttactggcatcgcgaatttgatggtatccgcttcattctcagtcgaggattccgtacgctgcatggccacttctttgaccatcttgagtactgtctcgctggcgtccggtacatgctgcgtccagacggtggtgtcaccgttcaaatcgcattcctcgacctgagtgccatgcccggctcgacggccgttgatttcggccgagcaccatttaggcgtccagtgagtgtctggcggcagtcggaatgtgcggtcgtcagcggtgccgttgaccacaatgcacacgtccacctcactgttggacagcaatcgcatggtgaagctacgtacgcccagatcgaaccagtcacgctccatcggcgtggtgccgtcgggcaggaaccactgcacgcggcttgagggcttgagtaggccgagctgggtcagtcgggtgaagaagtcctcgtggtgatacaggtccagtgatttacgtagcgccaccagtcgagacacggtttccaagcggcgcatttcgcgcgtcttgttggtggaatacatccaatcccacttcagccacgtgatgtcgttgtcttggcagtaggcgttgttgttgccgtcctgcgtgttgcggaattcgtcgccggcgagcatcatcggcgtacccagcgagagcagcagcatgccgatcatgttcatggccgcctgttcgcgtgccgcaatgacgtctggatcatcggtgacgccttcgacgccgaaattggcggaatggttcaccgacgagccatcattattgttttcgccgttggcttcattgtgcttggagcggtatctggtgaggtccgtcagcgtgaaaccgtcgtggcaggacacgaaattgatggaggccggagcgccacgccctggttcggtggcgaacagatcggccgagccgcagagtcgcgtggacatctcctgcaaactgatacgcccgaaatcggagccgccgtccacatcctcaagccagaaggtgcgggccgtatcgcggaagcggtcattccattcggcgaacggcacggagaattggccggtgcgccagccgaggttgcccagatcccacggctccataatgagcttcaggttgcccagcagcaaatcggaacgcagggcgtagaggaacgggtgatgatgggtgaattcgccttccaggcgggccagcgtgacgccaaggtcgaagcggaaaccgtctatgccgatacgcttggcccagtatcgtaatgagtcgatggcaaaggtgaccacatgcgtgttggtgaagtccagcgtattgccgcagccggtggtgtcttcgagtcgaccggtattggatttttgatggcgatagtaggccagatcgtcgaggccgcgccagcagaccgtcgggccttcgacgccgccttcgcatgtgtggttgtagaccacgtccatgatgacttcgaagccggcctcgtgcagtgcgcgcaccatgtctatgacttcttggcgcacggcggccgcgcccttctcttgggcggctttagtggcgtaggagggttcgggggcgaagtagctgagggtggagtagccccagtagttcttgcggccgtgttcttgcaggaagagctcgtcctgcttggccataatcggcagcagttcgatggatgtgatgcctagaccctgcagataggcgagcgtggtggggtgtgcgagtccggcgtacgtgccgcgcaatgattcgggcagccacggtgcgttggcggtgaagcctttgacatgcatctcgtagatgacggttttgcgccacggcacatgcgggtgctgcgggtcgccctcatgcttatggatatcgcgatcgtcgatggccacggacaccggcacatggccgagcgagtctacggtgctcatggcaccgtatgccgaaccggttaccttgtggtccacgacatcgcattcataggagaaggcggcgggggtgagctccatggagccgtcgatgcccttgccatacgggtcaagcaggaatttgtatggattgaagcgcacgccgtgtttcgggtcccatgcgccgtccacgcggtagccataacgcatgccgtcccatgctttgggcaggtgcacgtaccacaggccgtagttcggcccggtcatgcggaacaaggtctcgcgcagatacaaatgttcgataatgcgtgtgcataccgggaactcatgaatctgctggataaaggagatattcgggtcctcgaacaggcggatggcgtcttggaagaaagcgctgggctcatcaatgggctccagcacacacagccaaacctgatcggcagtttcggaacgaacaacgacgtcagccccaccgtcgtcagtgaagtacagccctgggcgagtggcgtaacgatgcaacggtgggtttttcatacctccattgtagacgtgttgtcacttttggtggaagcccttgatttcctgccgcgttccgcagcaccgcagatgccgtcgagataattctcggcgaaccgcaacgcggcaccgatgatgttctgatcttcggcgcagtagctcttgcgcagattgaaatggtcggtgccgaacgggctgcgtgcgatgacgcgcgtcttcagatcctcgatgtcgctgtcttcaagatgctgggctgcttcaccgccgacaatcacgtcgcccgcgatgatggatcgcgcgttgacgatggcctgcgccacgtaatccagccactcatccatgcgctcgcgatgatgccgttcgccctgctcaagcacgctgaagaagccgggaatgctttcgtaatcctcgggcaaggtctccggcgagcagtaggtgtccatgcaaccgcgctggccgcagtagcattcgcggccgcccggcaccagcgtcatgtgttcgatggcgccgttgcactggttcgggccttgatacagtttgccccccgcgatcaccgcgccgcccgggcgtcgctccagatagacgcacaccgcatcggtgagcgtggagtcgaaccagagttcggccatggctgaggcatcggaatcgtggatcatcatgcacgggtaatggaccgattggctgatggtttcgagcgtgagcccagtgttgcccataatggtgccgaagatgatggtggtggcgtcgggggagaggatgccttggatggcgaacgagacgccgagcaccttgccgtgcttcttttcgacgtcggcggcgaagttgttgatgatgccgccgatacgctggtagtaaacgttggtgttgcggtaaggcagggcatcgttgcgtttttcgatgacgttgccgtacaggttaatcgcgcacaggcgcagttcgttggaccgcatcactaccccgatggcagtgcgatgatcgggattgaactcataattttgcgccttgcgcccgccggtggaatcctgcagttcgcctttgcggatgagtccgtcatcttctagtgcgtgcagattttgggtgatggtgggcaggctgaggccgagttcgcgttccagttcctgcttggtgacatggctatggccatacagatactgggccatggcactgcggttgtgcgctttcactgcggtcgatggcattgccctcatgtttacccctttgtgcgatgagatatatgcaagtttactttatgaaagtggctttcatgtgcctcgacgcggaggttatgaggcaacaatcgtatatttgtaggcgattttgggtacttttttaaaccaactttctagaaatgtggagaaaatgattgcttttgaaaacttactttaaaaaagttctcggattgtgttgtttgcaggcatgtgattttcggtaaaaagtgaacaaaaagtaccaaatcgccggatagagtgaggatttgttcgatatttcgcacaactcgtaacaaaaactgttcaatatcgcacgtgaaacgccgtcgattttgtgcgtatgcgtcgcgccggaccgttcagtatattgtgcctcaggtcacatatgcaatgtgacaacgcatcaccggtcattttcggttactgaggcggtatcccgctggtgcaactgaggtgacgaggcgatggcccagaactttgccatataccccaagaagatcgaggaggaccccaagtggcagaagcaaagaagaaggtcgaagctaccaagccgactccagaagagaagcaggccgcagctgaggccgaagttgacgcgctggttgcccgcgccaagaaggctctcgtcgaattcgagaacctcgaccagaagcaagttgatcgtatcgtcgccaaggcctccatcgccgctctgaacaagcacctcgttctcgccaagatggctgtcgacgagaccggccgtggtctcgtggaagacaaggccaccaagaacatcttcgcctgcgagcacgtcaccaactacttggccggccagaagaccgtcggcatcatccgcgaagacgatgtgatgggcatcgatgaggtcgccgagcccgtcggcgtggtcgccggcgtcaccccggtcaccaacccgacctccaccgccatcttcaagtccctcatcgccctgaagacccgttgcccgatcgtcttcggcttccaccccggcgcgcagaagtgctccgtcgaggccgccaagattgtgcgcgacgccgccatcgaagccggtgctcccgagaactgtatccagtggatcgagcacccgtccatccaggccacaggcgccctgatgaagcatccgggcgtggccacgatcctcgccaccggtggtccgggcatggtcaaggccgcttactcctccggcaagcccgccctcggcgtgggtgccggcaacgccccggcctatgttgattccgatgtggacatcgtgcgcgccgccaacgatctggtgctctccaagcacttcgattacggcatgatctgcgccaccgagcaggccatcatcgcccacaaggacgtctacgaccagctcatcaaggagctcaaggtccgtaaggcctacttcgtcaacgccgaagagaaggccaagctggaacagtacatgttcggctgcactgccggttccggcgtcaagcccgtgctgaactccgcggtgccaggcaagtccccgcagttcatcgccaaggctgctggcttcgagattccgtccgacgccaccattctggccgccgagtgcaaggaagtctccgacgacgagcctctgacccacgagaagctcgctccggtgcaggccgtgctcaaggccgacaacaaggagcaggccttcgagatgtgcgagaagatgctcaagctgggtgccggccacaccgccgccatccacaccaacaaccaggagctcgtgcgtgagtacggcgtccgtatgcacgcctgccgcatcatctggaaccagccttcctcccttggcggcatcggcgacatctacaacgccatcgccccgtcgctgaccctgggctgcggctcctacggcggcaactcggtgtccggcaacgtgcaggccgtgaatctcgttaacatcaagcgcattgctcggaggaacaacaacatgcagtggttcaagatcccggccaagacctacttcgagccgaacgccatcaagtacctgcgcgacatgtacggcatcgagaaggccgtcatcgtgtgcgataaggtcatggagcagctcggcattgttgacaagatcatcgaccagctgcgcgcccgctctaaccgtgtgaccttccgcatcatcgactacgtcgagccggagccctccgtcgagaccgtcgaaaagggcgctgagatgatgcgcgaggagttcgagccggacacgatcatcgcggttggcggcggctccccgatggatgcctccaagattatgtggctgctctacgagcacccggaaatcgccttctccgacgtgcgcgagaagttcttcgatatccgtaagcgcgccttcaagatcccgccgctgggcaagaaggccaagctggtgtgcatcccgacctcctccggcaccggttccgaggtcaccccgttcgccgtgatcaccgatcacaagaccggctacaagtacccgatcaccgactacgcgctgaccccgtccgtggccatcgtggacccggtgctggctcgcacccagccgcgcaagctggcctccgacgccggcttcgacgccctgacccactcgatggaagcctacgtgtccgtgtacgcgaacgacttcaccgacggcatggccctgcacgcggccaagctcatctgggacaacctggctgagtccgtcaatggcgagcccggcctggtcaagaccaacgctcaggagaagatgcacaacgccgccaccatggccggcatggcattcggctccgcgttcctcggcatgtgccacggcatggcccacaccatcggtgccctgtgccacatcgcccacggccgtaccaactccatcctgctgccgtacgtgattcgttacaacggccagattcctgaggagcccacttcttggccgaagtacaacaagtacatcgccccggaacgctaccaggatatcgcccgcaacctcggcatcgacaccggcaagaccccggccgaagccgtggagaacctggcgaaggccgtcgaggactaccgtgacaacaagctcggcatgaacaagagcttccaggattgcggtgtggacgaggactacttctggtccgtgctcgatcagatcggcatgcgcgcctacgaggaccagtgcaccccggccaacccgcgcatcccgctgatcaacgacatgaaggacatcgccgtcggtgcttactacggtgtctcccaggcggaaggccacaagctgcgcatcgagcgcgagggtgaggccgccactgaggaagcctccgagcgttgattgcaggcggtttgtggttggtggcaccatcagtagccaccaaccgcggtgttgcagcttagtggctgcatagcgcgacacaaggagcccgaccccattacaggggccgggctcctttgcatatgtggcgctccctcagccagcaggtacctccatggggcggtaacccactcatggggcggtaacttgcccatggggcggtgaaaaccccatggggcggtgtacaaaaacggctctattctgcggaaggtaaaattttaccgtccgccccatgggtcaattaccgccccatgagtgggttaccaccccatggaatcgctgaagcgtcgctaaatcgccgcaataatgcagccaaaagcaataaagctggcaaacgcctcggtaatgccggtcaccacgggcttcaaggttgtgcgccgtgtaaccaccggcaacgcaacggcgcgggccaacagcagcacagtcatcgcaatcagatacggactgcgtccagacggcacggcggctagcagcaatagcgccacatgccatacccacgaagccgccacgtatgaacacttcccgcgttcccggatcatggttttgaccaccaaaaccgacccatactgcgtcagcgcaaacagcacggtggcaatcagcccgctcacgggcaatgaacccgcgggccaccaggcgtgaaggtcgaatatctggctcaaatctggcatattccgaatcgcggtgcgtgcggcggtgacatcagcggctgcgcacgaggcatgtgctgcgttgatgggcataacacatgccgtctcaacagtgctgccaaacgacgcgatcaccgtggccatggccgacgcggcaatcaccgacacggcattgccccacagcgagcgctccttcctcagccacgaggacagcatcgacagcgcaaccagcactatatataagggagcccaacgcagtatgccggtatgcgtaatcaggaatggcaagccgatgacgatgagcgctacggcataagtgagcatcggcggcagataacggcgtgaaaagtgtgctttgaaccagtgcgcggcgctgaactgcacgcaatagcacacggcccacgtcgccaatagccaaagcgtatcaagattaggcccgccgataaagaagccagccacagcgggcagcataaccattacccatgcgccaggttggttgtcgaaccaatcgcgtttaagagtcttgcggcgggaagtcatatctgtcatgatatcgcagcgaatggttctcaataagaaagatgtgagacctgcattgcgacaatcgaacagacgccgagcggctatgccgcgaggtaatacgaacggcatgagcgcgacacgcgcgaactccactgtcccacctcaatgcttgaataaacaagttgcctgatttgggctcgcaaattggaattaaaaaagcgagcgcgggccgggagccacttcaagtgaagtgacagccggaaaccgcgcactgatgtcggatgaccgccagaggacgtatgtccaagggaggccatgcgcgccggtgccctagaagcaggttggtaaacagtacaacgaacatcgctagaaagggcggacggcaatggcgggacagaaaatccgcatcaggcttaagtcctatgaccacgaggtcatcgaccaatcggcgaagaagatcgtcgaaacggtgacgaacgcgggcgcaactgttgttggccccgttccgctgccgaccgagaagaacgtcttctgtgttatccgttctcctcacaagtacaaggattctcgcgagcacttcgagatgcgcactcacaagcgcctcatcgacatcgtggacccgacccccaaggccgtggactccctgatgcacatcgatctgcctgcggacgtcaacatcgaaatcaagctgtaagggaggaggaagcattatgtctaatcgcaaggctctgctgggcaagaagctcggcatgtcccaggtgtgggacgagaacggcttcttcgtgcccgtcactcttgtcgacgtgtccaccaacgtggtgaccgctgtgaagaccgaggaatctgacggctacaaggctgtccagctcggctacggcgccatcgatcccaccaaggtgaccaagccgctggctggccactttgccaaggccggtgtcaccccgcgtcgccacctcgtcgaggtgcgcaccgacgacgtcgatcagttcgaggctggccaggaactggccgctgacctgttcgaagagggtgctgaggtcgacgtgaccggcaccaccaagggtaagggcttcgccggtaccatcaagcgttggggcttcaagtcctaccgccgtactcacggttctcacaagaacgagcgccgtcccggttctgtgggcgcatgcgccactccgagccgtattctcaagggcaagcgtatggccggccgcatgggtcatgtgaccgccactacccagaacctgaccgtcgtctccgctgatgtcgagaacggcatcctcgccatcaagggcgccattcctggccccaagggcggcatcgttctcgtccgctcggctgtgaagggagcctgataaaccatggcaaacgttactctgaacgtcaccgacgccaagggccaggccaccggcaccgttgaagctcctgaggctctcttcggcgtttccgccgaggatgtccaggctcacatcccgctgatccaccaggttgtcaccgctcagctcgctgctgctcgtcagggcacccacgccaccaagactcgtggcatggtttccggcggcggcaagaagccgtggaagcagaagggcaccggtcgtgctcgtcagggctccatccgtgcaccgcagtggtaccacggcggcaccgtgttcggcccgcagccgcgtgactactctcagcgcacccccaagaagatgaaggccgcagctctgcgctacgccctgtccgatcgcgccaacgccggtcgcgttgccgtggtggagttcggtatcaccgagccgtccaccaaggccgctgtcgccgctctggccccgattaccgcggacaagttcaccacggtcgtcttcactcgcgacaacatcaacgagtggctctccgtgcgcaacatcccgaccgttcacccgattttcgtcgatcagctcaacacgtacgacgtgattacctcgcagtacgtggtcttcaccaaggaagccttcgaggctttcgtggctgccaagaccgagccgaaggaggcctgatttagatggtcgctattcacaagcccgctcacgacgtgattcttaagcccgtcgtctccgagaagagctacgccgcttccgaccgtggccagtacaccttcgtggtggctccggatgcgaacaaggtgcagatcaagcaggcaatcgaagagatcttcaaggtcaaggtgacgaacgtcaacaccctcaaccgcgctggcaagaagcagcgcactcgcaccggtttcggccagcgcgcttcccagaagcgtgcgatcgtgaccgtcgccgagggccagacgatcgacatctttggtaactgaaggttagccgagaaaagttaaaggaagaactacattatggctatccgcgtttataagccgacgaccgcaggccgccgcaacgcgtccgtctcggatttctccgagctgactcgttctacgcctgagaagtcgctggttcgcaagaagtccaagaccggcggtcgtaactcttacggccgtatcacctcccgtcatcgcggcggcggccacaagcgtcagtaccgtctcatcgatttcaagcgttgggacaaggacggcgtgcccgccaaggttgccgagatcgagtacgatccgaaccgctccgcccgtatcgccctcctgcacttcgcagatggcgagaagcgctacatcatcgcgccgaagggcatcaagcagggcgacgtcatcgagaccggtgctcaggctgatatcaagccgggcaacaacctgccgctgaagaacatcccgaccggtaccgtggtccatgccatcgagctccgcccgctgggcggcgctaagatcgctcgttccgctggtgctgccgttcagctcgtcgccaaggatggcgcctacgctcagctgcgtatgccgtccggcgaaatccgcaacgtcgacgcgcgctgccgcgctaccgtcggcgaggtcggcaacgaggaccacgccaacattcagctcggcaaggctggccgcgcccgctggatcggccgccgtccgatcacccgtggtgagtccatgaacccggtcgaccacccgcacggcggtcgtacccgcggtggtaagccgccggtctccccgtggggcaagggcgaggttcgtactcgtcgtccgaagaaggcttcgaacaagatgattgttcgtcgccgtccgtccggcaagaaccgcaagtaagggagtatcgagaagatgactcgtagcatcaagaagggccccttcgtcgacgcccacttgcagaagaaagtcgacgagcagaacgagaagggcaccaagaacgtcatcaagacgtggtcccgtcgttcgatgatcacccctgatttcatcggacacaccttcgccgttcatgatggtcgcaagcatgtcccggtgttcgtcaccgaggccatggttggtcacaagctgggtgagttcgcccccacgaagaccttcaagggtcacgtgaaggacgacaagaaggcccgtcgctaaggataaggaatagaacatggaagctaaagcaatcgctcgtcacgtccgcgtgacgccgcgcaaggctcgccgcatggtcgacctcatccgcggcaagaaggcgaccgaagccgtcaccattttgaagttcgcccctcaggctgcggccctgccggtccgcaagaccctggagagcgccatcgccaacgctcgtgtgaaggccgacaaggccggcgagccgttccgcgagaacgacctgtacatcaaggagacctacgttgacgaaggtgtgaccctcaagcgcttccgcgctcgtgcccagggccgcgctgctcgcatcaacaagcgcacctcccacatcacggtcgtcgtggctaacaaggaaggagcccgctaaagatgggtcagaagatcaatccgtttggctaccgtctgggcatcactgagaaccaccgctccaagtggttctccgactccaacaaggccggcgaacgctaccgcgacttcgtgcttgaggatgatcagatccgcaaggagatgagcaaggacctcgagcgcgctggcgtgtcccgcatcgtcatcgagcgcacccgcgaccgcgttcgcgtcgacattcacaccgcccgtccgggcatcgtgatcggtcgtcgtggcgccgaggctgagcgcgtccgcgccaagctcgagaagctgaccggcaagcaggtccagctcaacatcttcgaagtcaagaacgccgcgctggacgcccagctcgtcgctcagggcatcgctgagcagctgaccaaccgcgtcaccttccgtcgtgccatgcgtaaggcccagcaggacgccatgcgcgccggtgccaagggtatccgcatcaagctctccggccgcctcggcggtgcggaaatgagccgttccgagttctaccgtgagggccgcgttccgctgcagaccctccgcgccctcatcgattacggcttcttcgaggccaagaccacgtacggccgtatcggcgtcaaggtctggatctacaagggcgacatgaccgaatccgagttcgaagagcagcaggctcagcagaacaaccgtccgggccgtcgtggtggcgatcgccgcccgcgccgtggcaaccgttccgccgccccgcaggccgccgaagcccccaaggctgaggctcccgccgaggccgctccggctgcagaaacgaaggagtgagcaagaatgcttatccccaagaggactaagtaccgcaagcagcaccgccctgtgcgttctggcatgtccaagggcggcaacgagatcaacttcggtgatttcgccatccagtccctcgccccggcctacgtgaccaaccgtcagatcgaagccgcgcgtatcgccatgacccgctacatcaagcgtggtggccgcgtgtggatcacgatcttcccggatcgtccgctgaccaagcacccgctcggtgcccgaatgggttccggtaagggtgccccggagttctggattgcgaacgtgcgccctggtcgcgtgatgttcgaaatcggtggtgtgtccgaggacatcgctaaggaagccctccgccgcgctatcgacaagctcccgatgaagtgccgcattatcgcacgtgaaggtggtgatatctgatggcagtcggtaccgctgattactccatcaagaatctcaacgagaagaccaacgcggaaatcgaaggcttcttgaagaagtccaaggaagagctgttcaacctgcgcttccagcacgccaccggtcagctcgagaacaccgcccgtctcaaggctgtcaagagcgacatcgcccgcatgtacaccgtgcttcgcgagcgtgagcttggcatcagccaggagccggccgctaccgaatccaaggagaagtgattatggctgaagagcgtaacttccgtaaggttcgccgcggctacgtcgtgtccgacaagatggacaagacgattaccgtcgagctcgagcagcgttcgacccacccgctgtacggcaaggtcgttcgttccaccagcaaggtcaaggcccatgatgaacacaacgacgcccacattggcgacctcgtgagtattatggaaactcggcctctgagcaagaccaagcgctggcgtctcgaatccattatcgagcgcgccaagtaagtaaagttcggcaaggctcgccatttaccggggcattatgggcaaccacgatgccccggtaaatggggagaaccagctcggctaaggagaatcaatgattcagcaggaaacgcggcttcatgtcgccgacaacacgggtgcgaaggaactcctcgccatccgcgtgctcggcggatcgaagcgacgctatgccggcatcggcgacgtgatcgtcgcctccgtcaaggacgccattcctggcgggtcggtcaagaagggcgacgtggttaaggccgttgtcgtccgtaccgtcaaggaatcccgccgtgcggatggttcctacatcaagttcgacgagaacgccgccgtcattctcggctccggccgtgaaccgaagggcactcgtatcttcggaccggtcggtcgtgaactgcgcgagcacaagttcatgaagatcgtgtccctcgccccggaggtgatctgacatggcagccaagatcaagagcggcgacctggtcaaggtcatccgcggcaaggaccgcggcaaggaaggcaccgtcaagcaggtgctctccaacgatcgactaatcgtcgaaggcgtgcagatcgtcaagaagcacgtgcgtgcaacgcagcagggccagcaggctggcatcgtctccactgaggctccgatccatcgctccaacgtgatggtcatcgacccggagaccaagcagccgacccgcgttggcatcaccgttaaggaagaggcgcgtgacggcaaggtgaagaccgtgcgcgtgcgcgtcgccaagaagtccggaaaggagctggcatgaccgatactactgtcgaagcgccggccaccccgcgcttgaaggtcaagtacaacgagcagatcattcctgagctcgagaaggagttcaagtactccaacccgatgcaggttgctcgtgtccagaaggtcgtcgtctccatgggtgttggtgccgctgcccgcgactccaagctcatcgaaggtgccgtcaaggacctcaccctgatcaccggccagaagccgaagatcaccaaggccaagaagtccgtcgcgcagttccacctgcgtgaaggccaggccatcggtgcgtacgtcaccctgcgtggcgaccgcatgtgggagttcctggaccgtctgctgaccctcgcgctgccccgtatccgcgacttccgcggcatcaacggccaccagttcgatggccagggcaactacaactttggtctcaccgagcagtccatgttccacgagatcgatcctgattcgatcgatcacgtgcgcggtatggacatcactgtggtgacctccaccaaggacgacaaggaagcttacgcgctgctgaagcacctcggcttccccttcaaggagaactgatatggcaaaaaccgctcttaagaacaaggcggccggcaagccgaagttcaaggtccgcgcttacacgcgctgccaggtctgcggtcgtccccactccgtctaccgcaagttcggcctgtgccgcatctgccttcgtgagaaggctcaccgcggtgaactgcccggcgttacgaagtccagttggtaaacatcgacgctgaaggtccgcggcccgaacgcttctagaagaagcgtgagggcggcggaaaccatagcgagaaagggcaacaagcccaaatgacaatgacagatccgatcgcagacatgcttacgcgtctgcgtaatgcgagcgcggccaagcacgaaaccgtggatatgccgtactccaagttcaaggcgaacatcgccgagatcctgaagcgtgaaggctacatcaaggacttcaccgctaaggaagccaaggtcggccagactcttgaggtcaccctcaagtacggtccgaacggtgagcgttccattcagggtatcaagcgcatctccaagccgggccttcgtcgttacgcgaagtccgactccctgccgatgccgctcggtggcctgggtatcgccatcatctcgacttcttcgggactgctgactcagaaggaatgcctcgaccgaggcattggcggcgaaattgtcgccttcgtgtggtgagaaaggagagctgaaacatggcatcgcatattggtaagctccccatcgccatccctgctggcgttgaagtcaagattgaaggccagaacttctccgccaagggcgctaagggttctgactcctacgtggttccggaaggcatcaccgctgccgttgaaggcaacgagattgtcctgaccgccgctgatgacctgcgtccgacccgtgccaagcacggtctggctcgttccatcatggccggcatggtcaagggtgttcacgatggctactccaagactcttgagatcgtcggcaccggttaccgcgccgtcgccaagggccagggcatcgagttcttcctcggctactcccacaccatcaccgtcaacccgcccgaaggcatcaccctgaaggtgaccgacgccaaccacgtggttgtcgaaggcaccgacaagcaggtcgtgggccaggttgccgccaacatccgcaagctgcgcgctccggaaccctacaagggcaagggcatcaagtactccgatgaacgcatcctgcgcaaggctggaaaggctggtaagtgatatgagcgttgctattctcggaaaaggcaagaaggtagctctcaagcgccgtcacgcgcgtatccgcaagcgcatctccggtacccccgagcgtccgcgcctggtggtcacccgctccaaccgtcacatggttgctcaggtggtcgacgataccaagggcattaccctggtgtctgcctccactcttcaggccgacttcgccggcttcgaaggcaccaagactgaggccgccaagaaggtcggcgagctgatcgccgagaaggccaaggctgccggcatcaccgcagtcgtgttcgaccgcggtggcaacaagtacaccggtcgcgtcgcagccgttgctgatggcgcccgcgagggaggtcttgcactgtgagcgacaacgaaacgaaggaaacccaagtggctgaagaaactcagaacactgtggcgaccgaatccaacaacgaggaccgcaagggtcgtcgtggccagcgcggtgaaggccgtcgtggcgagcgtcgtaaccgtcgtgaagaaaaccacggcgacgagctgctcgatcgcgtggtgaccatcaaccgtgtgtccaagacccacaagggtggccgtaccttcagcttcgccgcactggttgtggtcggcgacggcaacggcaccgtgggtgtcggctacggcaagtcccgtgaagtcccggccgccatcgccaagggccagctggacgccaagaagcacatgttctctgtgcctcgcgtccgcggcaccatcacccacccggttcagggtcacgacgctgctggcaccgtcctgctgcgtccggccgccccgggtaccggtgtaatcgccggtggctccgtgcgcgccgtcatggaatgcgcaggcatcaccgacgtcctgaccaagtcgatgggctccgccaccgccgttaacgtggtgcgcgctaccgtcgacgccctcaagcagctcgaagagcccgaggagatcgccgcccgtcgtggcctggcgctcgacgaggtcgctcccgatgctctgctgcgcgcccgcgccgccggcattgccgaggctcgcaaggctcgcgaagaggctgctgccgctaaggccgccgaagagaaggatggtgagtgatactcatggctaagaacctgaagattaccctgcaccacggcatcgtgaaccgtaccccggctcagcgcgccaccgtcaagaccctcggcctcaacaagatcggtaagaccgttgtccgcgaggacaccccggccaaccgtggtctggtgaacgccgtgcgtcacctggtcaccgttgaggaggttgactgattatggcagataacgaaatcctgcagatgcacgacctgaagcccgccccgggtgccaagaaggaccgcacccgtgtgggccgcggtgaaggctccaagggtaagacctccggtcgtggcgccaagggccagacgaagcgcaaccacgtgcgtccgggctttgaaggcggccagctgccgctgtacatgcgcctgccgaagctccgtggcttcaagaacccgttcaaggtcgagttccaggtcatcaacatcgctcgtctcgtggagctcttccccgagggcggcgaggttgctgtggccgacctgatcgccaagggcgctgttcgtgacaacgctccggtgaaggttctgggcgacggcgagaccaccgtggctttcaccctcaagggtgttaaggcttcggcttccgccaagtccaagatcgaggccgccggcggttccgtttccgaggactgattagtcctacggggagcgcaataggctgtacaacccccgcccgccaataggtggacgggggttcccttttctaaaaaattgttgttctgagtgcagagaagcagtctcaacacaatgatcgttttgagtatgcttccccccgttcagtacgacggagcataattcaggtaacattcgcgagacatgaagtggccgaagtaggcactttagactatgctcgtttgttagtttgtgtatttcgcgcgattggcgcgctattgggaggaaatctaggtgaggacactaatccaggccctgaaaaccaaagagttgaggaagaagattctcttcgtcctgttcatcatcatcgtctaccgcatcggatcgttcatcccgaccccgggcgtggactacaacgtggtgaacaagtgcatggccactatcggcagcgcctcccaggagaacttcatcggactggtgaacctcttctcgggtggcgccatgctccagctgtctatcttcgcgctgggcgtcatgccgtacatcaccgcgtccatcgtggtgcagctgctgcgcgtggtcatcccccgcttcgaggccctgcataaggagggccagtccggcgaggccaagctcacccagtacacccgttacctgaccatcggcctggccgtgctccagtccaccaccatcctggtcaccgcccgctccggcgccctgttcaactaccagtgcgaccaggtcatcccggacggctccgtgttcaacctcgtggtcatggtcctcatcatgaccggcggcaccggcctgatcatgtggatggccgagctcgtgaccgacaagggcatcggccagggcatgtccatcttgatcttcatgtccatctgctccggcttcctgccgcagctgtgggagatcggctacggcaccaacggcaccgacggcgactggctcaagttcggcatcgtcgtgggcgtgctcgtggtcatcctcatcttcgtcgacttcgtcgaactgtgccagcgccgcgtcccggtccagtacacgcgccgcatgatcggccgtaagatgtacggcggctcctccacctacctgccgctgaagatcaacatgtccggcgtcatcccgccgatcttcgcctcctcgatcctcgccatcccgaccctgatcgcccagttcggcaagtccgaccagtcgtgggtcaagtggatcaacgccaacctggcgaacaccacctccgtgtggtacatcgcgctgtacgcgctgatgattgtgttcttctgcttcttctacacctcgatcacgttcaacccggacgagaccgcggacaacatgaagcagtacggcggcttcatccccggcatccgcgccggcaacgccaccagccgctacctgacctacgtgatgaaccgactcaacaccgtcggcgccgtctacctgctgttcgtggccctgatcccgaccgtgctgatcatggccctcggcctcaacgccaagctgccgttcggtggtaccacgatcctgattatcgcgggcgtgggcctcgacaccctgcgccaggccaaggcccagaccgaacagttccagtacaccggcttcctgttcgaaaacgtggaccacaaagagggctgacgcccgcttggcagcggtcgcccgcaatgggcaggcggccgcgcgaggagtggaacagtccagtggactgttccacgacggagcaatctttcttccgcatataactcaatggctcccttaaccaagggagccaaaaccgtattaataaccgacataaaaggagaccaccatgcgtctgctcatcatgggcccccagggcgtgggcaagggcacccaggctgctctgctcgccgaacacttcaacatccccaccatctccaccggcgacatcttccgctacaacatcaagaacaagaccgaactcggccttgaggcgatgagctacaccgacaagggcgagctggttccggactccctgaccaacaagatcgtcaaggatcgtctggccaaggaagactgcaagaacggctggatcctcgacggctacccgcgtaacgccgcccaggtcaccgctctcgacgagatgctcgccgacctcgacactccgctcgaccacgtggtggccctcgaagccgcccgcgacgtgctgctggagcgtatgaagaagcgcgccgccgagcagggccgcgctgacgacactccggaggccatcgccaagcgcctggagacctatgagaaggaaaccgctccgctgctcgatatctacgaggcccgtggcctgctcgtcgtggtcaacggcgtcggcgacatcgacgagatcagcggccgtatcatcagccacctcgagtagtaggttcggcagcccgggcaacaagccggagtgatgccgaaataccacatcaacgtttccatacccctgtgcgacacgccgagtgttcgtacaggggtatgtgcgtatatagttgacagttggtgtgtcttcggatatgccatagtaatcatccaacggaataggactagaggcacatggcaaaagacggtgtgattgaagtcgaaggacaggtcgtggaagcactgcctaacgcgatgttccgcgttgaactcgaaaacaagcacatcgtgctcgccacgatttccggcaaaatgcgtaagaactacattcgtattctgccgcaggatcgtgtcgtgctcgaaatgagcccttacgacctgaaccgcggacgcattacgtaccgttacaagtaaaggtacacaagaaaaggataaccatgaaggtcagccctagcgtgaagaggatctgcgaaaactgccgcgtgatccgccgtcacggccgcgtcatggtgatctgcgtcaacccgcgccacaagcagcgtcagggctgagagcagattctccagcggcactaagtaaataaggcactctctcacagtgcttcccgcaagggaacgacactgaaccacgggtacgtaggcccgtgccgggtaaccgggcgagcgggtgcaagacctacggcaacaagaaggaatcgcaatggcacgtcttgccggagtcgacatccccaatgagaagcgcatcgagatcgccctcacctacattttcggtgtgggtcgcactcgtgccaaggaaacgcttgccgcgaccggtattagcccggacatccgcgtcaaggatctcaccgacgagcagctgattacgctgcgtgactacctcgaagccaactacaagatcgagggtgacctgcgtcgtgaagtcgatgcagatattcgtcgcaagattcagatcaactgctaccaaggccagcgtcaccgtaagggacttcctgtgcgcggccagcgcaccaagaccaatgctcgtacccgcaagggcccgaagcgcacggtcgccggaaagaagaaggccaccaagtagtcggtggcatgattcgggccacgggatgattttcatcccatcgcccgaacgtcaacaacaaagttcgttactaggaaacgagggtcaatggcagcgcctaagcaagccgctcgtaagccccgtcgtcgcgaccgcaagtcggtcccggtcggccaggctcacatcaagtccactttcaacaacacgatcatttcgatcaccgatccgtccggcgccgtggtgtcctgggcgtccggtggcgatgtcggcttcaagggctcccgtaagtccacgccgtacgccgctggtatggctgccgagtccgccgcccgcaaggcgatggaacacggcgtcaagaaggtcgacgtgttcgtcaagggcccgggttccggtcgtgaaaccgccatccgttccctgcagtctgcgggcctcgaggttggttccatcaccgacgtcaccccgcaagcccacaacggcgttcgtcctccgaagcgtcgtcgcgtctgagcactcagcaataccaaatccatccaaaaccgcctgaccggtgagtgcaccaccgagttcaagctgaaaggataaccacagtgcttattgcacagcgtccgactcttaccgaggaatctctgaatccgcagcgctcccgcttcaccatcgagccgctcgagcctggcttcggctacacgctcggcaactcgctgcgtcgcacgctgctgagctccatcccgggtgctgccgtgacctccgtgcgtatttccggtgccctgcatgagttcaccactctgccaggtgtccaggaagacgtcaccgagatcctgctgaacatcaagggcatcgtgctcaccagcgaatacgacgagcctgtggtcatgtatctgcgcaagagcggcaagggcgaagccgtggctggggacatcaccccgccggccggcgtcaccattgccaacccggagcagcacatcgctaccctcgccgacgatggcgaactcgagatcgagttcactgtcgagcgtggccgtggctatgttcctgcccagatgaacaagcaggacaacgatgagatcggccgtattccggttgattccatctactccccggtactcaaggtgagctacaaggtcgaggccacccgtgtggaacagcgcacggacttcgacaagctcatcctggacgtggagaccaagcccgccatctccccgcgtgacgcggtggcttccgccggttccaccttggtggagctcttcggcctgtgccgtgagctcaacgcccaggctgaaggcgtcgaggtcggtccggccccggtggccgaggagaccaaccccgagatggccgttccgattgaggacctcaacctgacgcagcgttcttacaactgcctcaagcgcgagggcatccacaccatcggtgagcttgtctcccacaccgagcaggacctgctcgacatccgcaatttcggtatgaagtcaatcgatgaggtcaaggagaagctgcagaccttgggcctgagcctcaagtcctcgccgatggccttcgataccaataatctcgaaggtggcacgttcttctcgccggaagacgagtgatctgcctctttgaccaatcgttcgttcactaggcaagcagatgttcgggcatatgcccacctgcttgcctgaagaacggacatataaggagtaaacccaatgcctacacctaagaagggcccgcgtctggcttccagccccgcacacgagcgcctcatgctggcaaacatggcgaccagcctgttccagaacggccgcatcaccaccacgctgccgaaggccaagcgccttcgtccgctggcagagcgcctgatcaccttcgccaagcgtggtgatctgcactcccgccgtcgcgtgatgcgcgtcatccgcaacaagtccgtggtgcacatcctgttcacccagattgccgagcagatggagcagcgtgaaggtggctacacccgtatcgtcaagatcgctccgcgcgttggcgatgccgctccggccgctgtgatcgagctcgtcaccgagccggttgccaagaaggctgttgtgaaggaagctgaagccgccgccaaggttgccgaagaagaagctccggccgttgaggctgaggccactgaggctgttgaggctccggtcgaggagaccgccgccgctgaggctgaggctcccgctgaggaagccgctgacgccgagaaggccgagtgagctgaatagcgtttcgctaagctagctgaaagggctggaatccgtttgggttccagcccttttgcgttgttttcatagaatctacaacgtacgtacggcccgaatggcctcggctcttgcggccagctgatcatcggcgggatatgcgatatgctccaaagtcaggccctgcggcgcaatcggcccgcttgagccttcacgtactggctcggccattttgccggcaaaccactccagtgatttgcgtcccgaaccaactttgatgcatgagccgaccagggagcgcaccatattgcgggcaaaggcgtccgccacaatcgtgaacactaccaggccggactccagcgacggagtccgatatgcttcatgcgatgccatctcatccggtactaggggagtgatcggcacccgccgccaataggcggtcttgacttcacggatcgtagtgcctcccggattcggagtggcgaaggaaccaaaatcgtgcaggccgatggtcaatgaggctgcgcggttcataagctccagatccagcgcttcatccacggtaagtacgcatccacgcaggcgcgggtcgacctcagacgaacgatcggcgacccgatacacataagtgcgctccaatgcggagaacctggcatcgaagccgaccggagctacggcaatgccatgaatgacgatgtccgaaggcagcacagccttgagtctgcgagtcagcgcctcggtgaccggaatggtcatgtgacctacgcagcgattcagtacctcatcggatacatccagatgcgccacttggtgggaggcatgtacaccggtgtcggtgcgtccagccactgtcaagcgtaacggttcggccgcgtcatcggtcggcacccgcagcaccttgtgcagcgcatcttcaatggtgccttgcactgtacgaagattgggctgtttggcccagccatagaatccgccgccgtcgtaggccaagtcaatgcgcagtcgtgtcatagccattcattgtaacgagtgtggtcggcgagatgagtgcggtcggcaagatgcgtgcggtcggcaagatgcgtgtggtcggcgagacgagtgcggtcgtcaagatgcacgcggccggcgaagtgacctgcctgtaacattctcgcgcgtttgttgaaacgggcccgccttaggttgaaaccatcaaacccggttacggcttgcggcgtcagcgtgcgctcaaaacgcctaaccgcttgaagccacagaagccgccacagcaaggagcaggcacgatgatcgaatccgcagcacgcagactggcccatgaactggtaaaccgtcgcgaagcgattaatcgagagctgtcccgcaacggtgtgcgtttcggcatctacaagaacggcgaataccatgaccggctgttcccgtacgaccctgtgccgcgcattatcgaatccgacgaatacgacgaattggagaagggcctgaagcagcgcgtcaacgccctgaacgcctatctgaaggacatctactccgacaaggccatcatccatgacggcgtggtgccggaggaatacgtatacacctcggccggctacttcccgcaggtcaacggcgtgacccctcccggcggcattttcgcgcatatcgccggcgaggacctggtccaaggcgaggacggccgctggtgggtgctggaagacaacctgcgcatcccctcgggtgccagctacccgctgttcgtgcgcgacatcgagcgccgcatctccccgcgcctgttccgcgacgttcgtattcgcgataatcgcgaatacccgcgcctgttgcgcaaagccatggactttgtctccaccgagggcatcgccgtggtactgactcccggccgctacaattccgcgttcttcgagcacgcctatctggcggagaaaaccggtgcggcgttggccttccccgaagacctcgaagtggtggacaacaaggtctacttcctcgactacgccggcaaacgccaccgtgtgggcgtggtttaccgccgcctgtccgacgaattcctcgacccgttcgccttcaatcctgattcggtgatcggtgtgcccggtatcctgtccgcctaccgcgcgggcaacgtggccatcgtcaacgcgccgggcaacggcgcggccgatgacaaggccgtctactacttcgtgccgcagatgatcaagtactatctcggcgaggaaccgattctcaacaacgcgcccacgtacatgccgatgttcgaggccgaccgcaaggaagtcctgaatcggatgggcgagctggtcatcaaggatgtggccgaagccggcggttacggcgtggtgtttggttcgtcgctggatgccgccgcacgtgaggagctcgccaaccggatcaaggaggagccgcgtcgattcattgcccaagaggtgattcagttccgtgatatcgatgtggtggacccgaagaccggcgagatgtcgccgcgcaagtgcgatttgcgtgccttcgtggtcaccggcaagaatacgcacgtgtggtattcgggcttgactcgatactcgtcggtgcctggccagatgattgtcaactcgtcgcagggtggcggattcaaggatacgtgggtgttggcacccgaatccggcgtggagcatgaatacggtgccgaaacgcaggtggtgaacctgctgaaccagtcccgccgccactcgttgtctctggtcaccgcttccaaggcagacaacctgtattggctgggccggtacaccgagcgcgccttcaccacgctgaaccagttcttcccgttctacgatcgtgtgatggacactgatgtggacgccttccgtccgttcgctcacgcactcgacctgcccgaagatttcgaggacttcgacgggttcgtgaacagcttcctgtatgacgggtccaatcctgattcggtgcggtcggccgtaacctccgcattcaacaacgccgtgattctgcgcccggaattgagctcgcgtctgctgcagtacgtggagttggcgatgaccaatatcaccgatgccgccaaatacgcggccgatgccgaggacatctacaagcagcgcgatattaccgatgacatgctcgccttctggggcggcatcgagaattcgccggtcgaccccacgctgaaggcgttcatcttcatcggcaaatatctggaacgcatcgacctgtacacgcgcttcggcctgacgatggaggagctggaagcgccgctcaagaagctcgccgcctattcgatgaccttggacggcatgccgctgcccagctgctttgccgacggactgagctggctggtcggtcagctgccgtctcgcggatatcaggaagtcgccgacctgctgaagaagtaccttgacgactactccggccgtgtcagcgcgctggccatcaaagacatgggctcactgagctccatgaacatggacgccaagcgtccctgatcccgacctgacaccctgacgggttcaaatgctatggtggtatggcgaaaaaaccgtgcgcccgagtgccggcctgtgcatatcagcagattgccggaatatatgcgtgggctgtgagcgcacggaccatacctcagccatggctgtagtgtcgttatcccgagaatatgccggttgccggctcgtgtgcaagtgcaggagacgttgtgaaaaaactcgtgttcgactatgagatgaggctgtccttcagcgcaccggtcaccgatcacaggttccagcttcgctgtattccctccactggccctcgccaacaggtgattgacgtggaagtgaagattcagcccgaaaccgaactcgaaaccaccatcgactcctttgactccgtggtgatgaccggattcatccctgagccgcacgacatattcagctactcggtgaccggcatcgccttcgtggacaatgcgcatatccataaggaagcctataaaccgctgtaccgattcaattcagcgctcaccattcccggcccgaacgtggaggcgatgattgccgtatgccgcgaacgcttggcggcgctgccttccgacgccactccggtgcagcaggctgccgaagtgatggatgaggtctacaaggcgtttgtgtatacgcccggttccaccacgattcgcaccaccgccgaacaggccttggctcagcgcaagggcgtatgccaggattatgcgcacgtgatgctgtccgtgtgccggcatgtgggattgaccgcgcgctacattgccggtttgcttgggggagagggcgcgacccatgcttgggtcgaggtgtatcaggatggccgatgggtcggactggatcccacgcataaccgattggtggacgacagctacatcaccatcgcccacggccgcgattaccgcgactgcatgctcgacatcggcatcttctctggatacaacgtccagcagtcccaatgggtcaacgcctccgtccacgaacaggtggcataaataaaattccaagccccctctgatgagctgagccgtgaagaaaacgccggaggcgtttttaggcgaaggcgaacgacagtgagcaaataaaatggcagctggaaagctgtccttaattgcgttcgagctgtcagccgtaaggctgaccgagggagagaccactcaatgcagagtggccccgtcaccgcttctaccaccaccaatattcggattttggtagttgaagaattcggattttcgcagttgaccaattcggactgttaatcggctcatcgtctgacccatcgcaatctcacacaaaatcgcattatcccacgccgaatcgagctcagcgaaactccgatttgccaggtcggcagaatgtggcataatgaacaagttgccattttggcagcatggataagtgtccgagcggtctaaggagcacgcctcgaaagcgtgtgaggtgaaagcctccgcgagttcgaatctcgccttatccgcctttagggttccgggtttgtcccggaaccctttttgtttttgatacgaacgtccgtattcgctcctgtgctgtatcgtatacggcgtgtcgggtggaaaatagcgaaaaggataacgttgtactcagcgggacttgcgtactaagtacaaccatcgtattatcgatatcaacagaagtacaaggttgtattaaatatccagaacgcacattcaccgctgattggcgatgccgcaaaacaggtgaaccaagaagatgggccgattgcttttggtatttagcacaacgttgtcttgcggtattgaagacaacgattaaaggagagcacatgtccgagcattcgcacgacaataaaccgggggagctggaggaatctcgactcgtcgtcgataatgactttgaagtagctccggtcaacgacagactgttcgggtcgttcgtggagcatctgggtcgctgcgtatacgacggcatctatgagccgggccaccccgaagccgatgaagacggtttccgcaaggacgtcatcgaactggtcaaggaactcggcgctaccacgattcgctatcctggcggcaatttcgtttccggctatcgctgggaggatggcgttggtcctcgtgatgagcggccgcgtcgcctggacttggcatggcattccaccgagaccaatcagtttggtctgcacgaaatggcgaaatggctggaaaaaatcggcggcaacgagctgatggaagccgtaaatctgggtacccgtggtcttgaagaggccctcgacctgttggaatacgcgaatattcccggcggcaccaagctctccgaggagcgtcgcgccaatggtgccgatcagccgttcggcatcaagatgtggtgcttgggcaatgagatggatggcccgtggcagaccggtcacaagtccgccgaggattacggcaccttggcggcctcggtggcggcaggtatgcgcgccatcgatccgaacgttgaactggtggtctgtggttcatccagccacgtgatggacaccttcggcaagtgggaagaaaccgtacttgagaagacgtttgacaacgtcaacttcgtctcctgccatgcgtactaccatccggaacttcagcctgatggcacccgtgacatgaagagcttccttgcctcgggcgtcgatatggacggtttcatcaacgatgtcgccgccgccatcgatgcaaccaaggcccggctgaagagcaagcacgacgtgttcatctcgttcgatgaatggaatgtctggtatctcaacgaagagccgagcaagaatccggaaggcatcggcaattggccggttgccccgcgcctgctcgaggatgtgtacagcgccgccgacgccgtggtgttcggtgatttgatgattaccctgctcaagaacgccgaccgcgtgcacgccgccagcctggcccagttggtcaacgtaattgcgccgattatgaccgaaccgggcggcccggcgtggcgtcagaccacgttctatccgttctcgctgaccgcaaagctcgccaagggcggcacggtgcttgaaccgaaactggcttccggaacgtatgaaaccgacaaatacggtgaagtgccgacgatcaattccgtagccgtgcgtggtgaggacggtacgatcagcgtgtttgtggtcaatcgctccatggaagcggccaatgactttgccatcaagctgccggaaggattcgcactttccgcggtcgaggcgcaaaccctgcacgaggatgatctgctggcaaaaaacacgctggaagaccagaaccgagtcgttctgcaccccaacaccaccatcacgtccgacgccgataccggcactgtgcgtgtgaccttgccgccggtctcctggaccgccgtgcacgtgaagtgattcgagtgacggtggcgcatgacagggcgcagtctcttatggttgctgtgccctgtacaaccaccaagcaatacccaaacaatcatcaacatgcccggattgcagaaagagaggttcggattcgccactaatgtaatgtggcataccagtcaaaggaagacaatgccgtcattcacatcgactggaacaattcgatacccaacaaaggaataaggagaaaagacgggtatgtaaaaagctaggttgaaagccggcggtcagaaagtcccttgttcggatggcgtgcgtgcgtttcttcaaccagaaagtttaacctctacgttcgatcgtcctgcagtattgtcagaaggatatttgcctaatggtgcatggggtccaacggaggaaagctccttggctgaattctgaggttgaggggtagatgattccgatatgaggaggagatgctcgacccgactgtgacttaccataataagaacataatgacgctgttgaaggtgtgtcatgtaataagcagaaatggattcgaacaatgggaaaccgcgtaactatcaaggacgtggcgcgtgaggcgaacgtctccatcaagacggtttccaatgtgctgaatgacactggcagtatgagaccggatacacgtcgccgtgtggaagaggtgatgcgtaagcttggatataccgtcaatatttcggcgcgtgcaatgcgatctggcggcacaaagcttattggactcaacatcttcgatttctcgcagccgttcgttccttttttcactgacaaggtcattgaatacgcaaaagaacgccattacggtgtagtcatcaacacatatggttccgacggtgaagggttggttgccagcgttgacgagtcctatcgtttaggggcggaaggatggattctgttcgtaatgtcgccgctcgcggatgaaggggccgttctggagcagccatatccgattgtaacgaccggagaccatctggcctacgggaaaagcgattggatcaccatgcccaacattgaatccatctccacggttgtaggaagatttttggatgaaggtgcccaaacggttgctctgatgggtgttcttcctgaactggtggatgaggcagtgctgcgtcgtcagacggaagggacccaggcgttacgcgcccaaggatatgtgaaggcatttgaagagcgcggattatcggtgaattggcggtatgtgattccggcagaaagcatgaatcagcgtgaaggtatgcgcgtgacaaaagctatgctagacaagctcccatgcccggatgttgtagtgtgtctcaatgatgccattgctttaggcgcaattcatgaattgcaacgatgtggtttgcatgtacctgacgatgtacaagtggtcggcttcgataacgtgccggaagccgagtactcggtgccggcgctgaccaccatcgatcctcatatcgatgattatgccaagcatgccgttgacatgcttatcgaccgcatcgaaggatactcaggcccggcccgtacgtacaccaccgatttcacattggtggaacgtgcctcaactcgacttgcccactagcatccaacaagttcgcatcggcttcgtgaggagtgtgtgtctactcgaacaatgcggcgtcagtcgctgggtagccaagttggaacgcggtgtaggcgtgcttggcggccagtgcggcgaggatgagcagcgtatcgctctcggtggaagatttcgattcggtcacggccttgatctgcgcgcgggcgcagtccatttcgatggcggcggcggtcggtacggtttggccgcttgccttgtcggcgatggtggtggggttggccagtagttggtcgatggcatagaccttttggcgggggtcgttttggccggaagaactggattgtgcgccggaatcatcaaaattgccgttcgccagcgcaaccaactgctgcccggcggtcttatgcatatcgctcaacgccaacgtagccccagcggtctgtcctcgtgcggccaagacctcgatagcgaatccggcgcgatcctcggccacggccatcgcatccaataccgatcgatcaacgttggcggacgtgacgccatcaagacgcgccggcgtcacctcaggcgcggactgcccgaatttatcggccagaaaagccatccattgcttggtctgcgcgtcacgtaacgttccctcggcaaaacgacccgaacaatacccggcaacgtcaatccaagtcaggggagcggccaggccggtggcatactgctctaataacggcgtgccttcagccggatgggtggcgtagtccgccaacgtcatcgctttctcgcaagggctcatttgagcttccgcctcggcccgtccggccagtcgcggcatcgaacacgccgaaagcgaacacagcatcgcgctcgcgcatagtgcggatgccaagcgccgggtaaaccgtcctgaagagaagcgtgtctgcatggaaacctacactaatagctaactgtgaccactcataggccatgcgccacataacttcataggaggtacggatcgatggaactggacctgacaggaatacacaagctcgccgccgagcaaggaatcgaccccggaaccctggatgatgcgctggcagaggccctgcgcctcgcctacctcaagaccccgcacgccgccaggcacgcgcgtgtggagcttgacgaacgttccggcaatttcaccgtctgggccgccgacgaaatcccggtcgaacccaccgaagacaacccttaccccgttcccaagctgggcgaggaatacgacgacaccccgcgtgacttcggccgtctcgccgccgccactgcacgccaggtcatcacccagctgttccgccgcgccgaagatgagaaggtattcggcgcgttctccggtcagaagggcaagctcatcaccggcatcatccaacaggatgcttccgacccctccaacgtgcatgtcgcgatgggcgatgtcgaagccattctgcctcgccgtgagcaggtgcccggcgaacgttaccgccacggcgaacgcatccgcgtgtacgtggtgaacgtggcccgtggcatcaagggcccggaaatcgtggtgtcccgctcccacccggagctggtccgcaagctgttcgagcgtgaagtgccggaactggtctccggtgccgtgtccatcatggccatcgctcgtgaggccggcgcccgcaccaagatcgcggtcaaggccaacaccgatggcgtgaacccgaagggtgcgctgatcggccccggcggcgctcgcgtgcgtgccgttatggagaaccttggcccggagaagatcgacatcgtcgactactccgacgatccggccaagttcgtggcagccgcgctgtccccggctgtggccaccggcgtacaggtgatcagcgagaagaacaagaccgccatcgccttcatccacgacgaccagctatccctggccatcggcaaggaaggccagaacgcacgactggcagccaagctgaccggctggaagatcggcatcgaatccgccgaggcccatgccaagaaggtcgccgccgaaaaggccgcccaggctgcggccgaggctgctgctccggaagccgaataggccgccgggctcgaaggcgaatgatcttcagggcgcattatttcctgatacgagccgcgtcagcaatggcgcggctcgctgcgtctacgctatccagcgctatgagtatgcttgattggcgtatgtgggctggcgcagtgtgcgcgaaatcgcccacaccagagacgaggtaacacgatcatggtcgcacgatgagacagggtaggcttgccgtcatcaccaactgaccacgcccatgcacgcgcgtggtcacagaataggagtaattagtggcgaaaccacgcgtatacgaactggctaaggttttgaatgtcgatagcaaaaccgtgcttgagaagcttaaggacatgggagaattcgtcaagtccgcttcttctacgattgaaccgccggtagcccggcgtctgaaggcagagttcgccaaggacaacgccaagggcgattccaagcccgtgcagcagcgccgcccggccgcaccttcggccccggcttccacttcatcttccgcaccgactccggccgctcccgcacgtcaggcatcgcctgcctcggcacatcagcaggctccgactccgggtgcaccgacaccgcgtccgcagggcggcgcacgccccggcatgccgacccccggtcgccacggtcagaacgacaaccgtgagaatggtcgcgataatcgcgaaggccgtgagaacggtcgtcagagtcgcccgaacgatcgccgtaacaacgatcgtcgtaacaaccagggccgtccgaacaatagccagccggttcagcaccagaacaaccgcggcaatgcttcggctccgcgcccgcacgctcagggcccgcgcccgggcaacaacccgttctcccgcaagcagggtatgcacaccccgacgccgggtgatattccgcgtccgcatccgatggctcgtccgactgctgataacggtcgtggcggtcgtccgggccgtcccggccaaggccaggggcagggccgcggcttccgtggcggtcgtccgggccaaggtggtcagggcggtccgcgtcccggccagtggggccacaaccgtccgggtcagggcggcggctcccagggtgccggtcagggcggcgcacgcggcggcttccgtgggggccaaggcggcggcaataacttccagggcggcggtgcaccgagcaacggtcccgcacgtggcggcggtcgcggcggtcgcggcggtgccgcaggcgcattcggacgtcagggcggcaagtcctcaaaggcccgtaagaaccgtctggcaaagcgccatgagtatgaggagctgaaagcaccgaccatcggcggcgttcgcatccccaacggcaacggccagaccatccgtctgcgtcagggcgcgtccctggccgatttggcggagaagatcaacgtcaaccaggccgcgctggtcaccgtgctcttccacctgggtcagatggctaccgccacccagtccttggatgaggagaccttccagattctgggcgaagagatcggctggaacatccagctcgtctccgcagaagaggaagacaaggaactgctccagcagttcgacatcaaccttgacgaggaagaactgcaggatgacgaggatctcaagcctcgcccgccggtcgttaccgtcatgggccacgtcgaccacggtaagacacgactgctggataccatccgcaagaccaacgtcatcgcacgtgaggccggcggcattacccagcgcatcggtgcctaccaggtcaccgtgaaccttgaaggcgaaccgcgcaagatcaccttcctcgatacccctggccacgaggcgttcaccgccatgcgtgcccgtggtgccgagctcactgacgtcgcgatcctcgtggtcgccgccgacgatggtgtgatgccccagaccgttgaggccatcaaccacgctcaggccgccaaggtgccgatcgtcgtggccgtcaacaagatcgatgtgcccggtgccaacccggagaaggtccgcggccagctcaccgagttcggcttggtccctgaagagtatggtggcgacaccatgttcgtcgacatctccgccaagcagaacctgcacgtcgacaagctgctcgaagccgtgctgctcacggctgacgctgagctggacctccgcgccaaccccgacatggacgcccgtggtgccaccgtcgaagcccgactcgacaagggtcgtggtgccgtggccactgtgctggttcagcagggtacgctccacgtgggcgatgccatcgtggccggcacttcgtacggccgcgtgcgtgccatgctcgacgagaacggtcagccgatggaagcggccggtccgtccacacctgttcaggtgctgggcttgacctccgtgcccaccgccggtgacctcttcctggtcgcctccgatgatcgtgccgctcgccagattgccgagaagcgtcaggccaccgagcgtgccgcccagctggccaagcgtcgcaaggtcgtctccctcgaggacttcaagaagaagttcgccgagtccgagatcgacatgctcaatattgtcatcaagggcgattcgtccggttctgtcgaggcgctcgaggattccttgatgaagatcgaggtatccgacgaggtcggcatccaggtcatccaccgcggcgtcggtgcgatcacccagaatgatgtcaacctggccacggtcgacaaggccgttatcatcggtttcaacgtgcgtccgaaccgtcaggtcgcggacctcgccgagcgcgagggcgtggagatcaagtactactcggtcatctaccgtgcgatcgaagacatcgaggcatccctcaagggcatgctcaagccggaatacgaagaggtcgtcacctctcactccgagatccgcgagatcttccgctcctccaagttcggcaacatcgccggcgttatggtgcaggacggcgaggtcaagcgtggtacgaagtgccgtatcctgcgcaacggcgtggccacggtcaacgacctcgagatctcctcgctgcgtcgcttcaaggacgacgttcagtccgtcaaggaaggctacgaggctggtatcaacctcggcaccttcaacgacattgaactcggcgacatcatcgagaccttcgagatgcgggaagtcgagcgcaagtagtcattgttaagcccccctctgacgaggggggctgtcagccgcagactgactgggggagagacatggtagttccatgattttctctcccccagcctcactgcgttcggcagcccctcgtcagagggggctcaagtctagaaaaggaaattcctatggcaggaaccaacccgcgcgccgcacgtattgcggccttgattcagcgtgtcgtcgcctcctccattgagcgcgaactgcatgacaagcgactcgccagcatcaccgtcaccgaagttcgtgtgaccaacgatttgcagatcgccaaggtctactggacccagctcggccacgaaggccacgaggaaggcgaacgcaagcgcgcccagcaggcactcgatcaggccaagggccacctgcgttctctggtgggccacaaggctggcctgcgcctgactccgcagctccaattcgtgttcgatgaagtgcccggcgaggctcacgagatcgaagacatactcgccgtggccaagaagcgtgatgaagaactcgcccgtgctcgcgccaccgcccagtacgccggcgacgccgatccgtacaagcatgacgacgagcccagcgacgacttcgaagacgactctgacgaggagtagtgtgcttcatacaacacccagcggtctgctcatcatcgacaagccgcaaggcgtgaccagcttcgacgccgtcgccgccgtgcgcggcgcgttgcacatcaagaaggtcggtcacgccggcacccttgaccccatggccactggcacgctggtcatcgccttcggccacgccacacgactgctcaacgccatcgtggcgcatgacaaaacctacgaggccaccatacgcctcggcctgcgcaccactaccgacgatgccgaaggcgaggtgcttgtcgatggtgaagcccgttcccgctggcaaacgctatcagcgcagctgactgagggtggccagagcggcgaaccaacggcgttaccaactgcctcatggcaagacctgctcacacgcaccatcgccaccaatttcaccggcgatatcgaacaagtccccaatacgttctccgccatcaaaatcaacggccagcgtgcctacgacttggctcgcgaaggcaaggatgtggaactcaaaccccgcccggtcaccatcagcgaattcaccgtgctggatatccgcagcggattcgtagcaggggagcaggccgctgaaccattgcgggaagacgcgaacacgggagcgattcccgcacttgatgttgacgtgcggatcagctgttcatcgggcacctatatccgcgcgctcgcccgcgatctcggcaaagaacttggcgtcggcggatacctgacccgtttgcgccgtacgcgagtcggccgattcgcgttgccggacgatgccagcggacttatcgctcctgaggcgatgcttgacacgcgaacccataccgtcaccgcacataccgatcagaagacgttcactaatcgggaagggcaaaccgtcacgcgcaacaagtgcgtattggacactcctgaaggtcttgccggtgacgagcgccgcaactggctgcttgaccatgcccttaccatggaacaggccgctcgaggtgcgatgccggcgcttgacatcactcctgaggaggccagcgaattacgcttcggccgccgtattgagcgtacaatcagcgagcccactgccgccattgtgccgcaaacgcatgatgtggcggcgattatcgagcgtgcaaacgctcatcaggccaagccggtcaccgtattccccctcgcgtaaagtagacgcggtgaaaagtgcagcttgatacaggccgcgcacaacaacgtctatattgcatgaataacatcgcacggataaaaggaacagcacactgatggatatcacgcacctgacccctgacgccgaaggttcgattgaatggccctcgttcagtaacgataagaaggccgtggtgacattgggcgcatttgatggcatgcacttgggtcatcaggcggtgatcaagcgtgtggtggaactcgcgcaccagcatgatgctttttccgtggtgattctgtttgacccgcgccccgcattcgtgcacggctgggtcatctcgcaccatggcgaagagcccgcggttcagaacgtggatgccgaagcattgaccagtgtggatgatcgactgcaccgcatggaacagttcggcgtggaccatgtgctggtggtgcactacacgctggccttcgcagctatgtcatacattttcttccttggccgactcaccggcaagctgggtatgcgcacgttggtccttgggcaggatgccgccatgggcaagggtcgagaaggtgatgtgaagcatatcgccaatcttgccgccgccaccggtgtattcgaacttgatgtggtcgatgaccgtggcccgggtgaagtgcgtattccgcgcgatttcaagccggaagccccgagcgaatggggagagcccgtcgatccgctggccaatgccaccaaagccgagcgccgcgcatggagcaagaagaaccaggccaaggcaatgcgcgcatggagctccaccaatgtgcgctacctgctggctcatggccgaatccaggacgccaacgccattctgggtgctccgcactccatcgagggcgaagtggtgcatggtgaggagcgtggccgcaccatcggattccccaccgccaatcttggctccgacattgcaggctacattccggtcgacggcgtctatgccggttggctggtagatggtgaaaaccgttggcccgccgccatctccattggcaccaaacccaccttcagtgaaaaaaccggccttaatgagcgtgtggtggaggcctactgcatcactgaagaatggatcgacctgtacgaccacaaggttcgcgtcgaattcgtcggcttcctgcgcccgcaggtcaagtttgatggccccgaccaactcgtcgacgaactcaagcgcaacgtcgaggagaccaagcgtcttaccgcctgaggcatatctcagggctatttacgcactcccaaggcgtctaatgcgtcggacaatgtgttggactccaccagctgaagtccctcgacatgcaccggcttgcgcagtggcggaatgaccgccgtggtgaagccgaggcgtgcggcctcgcgaaggcgatattccatacgcggtaccgggcgcacctgaccggtcagggaaatctcaccaatggcgcacgtggctcgcgcaatgggttttgacgtggcggcgctcgccagtgccgccactatcgccaagtcggaaccgggctccttggcctggcccccggcaatagtggagatatacaggtcgttggacagcaggttgagcttgctgtgacggtagagcaccgcgaccagcatggcgatacggctggggtccacgccattgaccgcacgacggggtgtgggcagcaccgacgtggtgaccagagcctgtacttcgataggcagactgcgatgcccatccaatgtgaacgtcacgcaggtgccttccacgggtgccgcgttggccgcatcagggccgtctccagacaggaacaatccggcgggatcggtgacctcttcgatgccttcaccgctcatgtcgaaacagccgacttcatcggtcgggccaaaacgattcttcaccgctcgcagcattctcagcgcagtctcgctgtcgccttcgaattggcagaccacatcgaccagatgctccaatgtgcgcgggcctgcaatcgaaccgtccttggtcacatgaccaaccagaaatactggaatgtcaagtgtcttagcggtatctatcagcgcgcttgccacttcgcgcacctgagtcgaaccgccggaaatgccatcgacctcctgcgagacgatggtctgcgccgaatccacaatggccaaggccggcttgttctgttcgatcagccccaatactgtggacaggtcggtggtggaggccagtaacaagttcggctccaccgcattgatgcgggaagcgcgcaaacgaacctgcgcctgtgattcctcgccggaaatgtacagcacggtgttggcgtgtgttgatgatgcgttgccccgcatcggcaccgtgttcgatgcgttgccctgcgcccggcccgactgttgggcagaccgctgacctgcccctcggaacgtactgtctcccgccacaacgcgcgcgatattgccggccgtctgcaacagcaatgtcgacttgccgatacccggttcgcccgctatcagcgttactgaacccggcaccacgccaccgccgagcacacggtcgaattcggaaaacccggtaccgagccgctcgacgctttccgtgcccacttcggtaatcggacgggctgcagatctggcgttgttggcaaccgtaaccgactgcgtgcgtgatgttcggccgggagcggccgtgcgagagcctgccgccggccgagcctcgtgaaattcctcgaccgtgccccactgaccacactcggggcaacggccgtaccacttcggcccgttccaaccgcattcggaacatacatactgcacacttgatttcgccatggtctcaccctaacccaaacaccagcggacggtaaatttttaccgttcacaagagtttcacgcggcttgcgcacaacgactaaaattacggccgcctagcgtcacgcggctgtgagagaatcggggcatgactaatagtgagaactcctcgaccacgcaatcccatggcaagttgattgcagtggtggttgccgcagctgttgtgattatcctggcagtgctttcggcctttgtgtggccgggttgggccatccagaagaatgatggcacctccactaccacccaaaacagccagcagaaaaccgaatcatccgagccgaccaagccgaccatcgacgccacagctttgccggatgatgccagtgagctgttgaaggccatgccgggcagcgtgctgaattacgcgcgtaccaaggcggatgcctccacgacgtggaattccgcgtcgccgctcgaggagtacactctgacctactccactggtgatgccgccaaggatgtcacgctggtcgccgcgcagtggtcgtcggcggacaatgccaagacccagtacgatgcgttggtcgctgcgcagaccggcgatgagtcggcatccggcaacgtcaaggtttccggcaacgtcacgggcgcgtacgtggtgaaggccgatgcctccaacagcaagaacgccgttgccatctggcagaacgataccgtggtcttccaagctaccggcaccaaggaagcggtcgatcgcttctaccagaagttcccgatgtagcatctagtatcggctgtcagctgctgcacaaacttatgaacgttggggcatccacattgctgatgtggatgccccaactgcgttcagggcatatgcggactatcggcaacatactggttccctctgtctggcaacacgtgtattatggtgcgagttgcaacttttacgattaatcgaaatggaggcttcagatgggttctgtcatcaagaagcgccgcaagcggatgagcaagaagaagcaccgcaaactgctgcgtaagacccgccaccagcgtaagtagtcttacctgcaatcaaggcattagaaaccccgtgatcgttatggtcgcggggtttctcttttgcttggctctttgccttgttcgggcaacagtaaagcccgcacctgcgatgtgcagatgcgggcttggaaaagcttagtgatgtgagacgatcacttgttggcgttggtcatcacgcgcgggccgttcgggtcgccgacgatgaccttgtcgaccatgttgaggaacaggccgtgctccaccacgccgaccgtgttgatgaggtcttcggccagctcctgcgggtgatcgatgcgctccaggtgcaggtccaccacgaagttgttctcgtcggtgcgcacttccttgccgtcggcgtcaagacgaagcaccggcttgtagccgcgggcctcgaacttcttgatgacttggccggcaccgaacggaatgacctcgaccggcagcgggaacttgccgatggtgtccacaaccttggactcgtccacgatccacacgatctggttggagttggtggccacgatcttctcccacagcagagcagcgccgccgcccttgatgccgttgaagttcttgtcgacttcgtcggcgccgtcaatggtcacgtcgatgtggtccacgtcgtcgatgtccacgatcttgatgccgtagctctcggcctgggcctgcgtgcggcgagacgtggtcacgccagtgaactcaagaccttcctcctgatgacggcggccgagctcgtccaccaggaacttcacggtcgaaccagtgccgaggcctgcgatcatgccgttttcaacgagcttggcggcttcgatgccggccgccttcttcagcgcatcctgctgtgccttatccatggtttctcctttgccatccttgcctccgccgcacggatcaacggcgtgaagccttatctcctatcctaacgcgaatgagcgattttgtgtcatcgtgtccgattgcggtacatattcgtgtgtttgggtgtcagtgtcgtacgaatggtgcgttggtgatggtcaggttgccgtcgccgtccacatagccttcgatttcgatgctgcctttgatcggcatcggctgcccgttgaaatacgggctcgttttcggcgcgggggagaaggtcagcgtaccggataccgtcagcccgctgggctttgcggggggtacaggttgcgttgattgtacaggttgcgttgattgtgccgctaagggtgacgaagacttggtctccggccttgcggcatccgtctgatccgtcgccgcagccggcttgcgcaaacttgccgcatccgctttgccgtccaataccaattgcacgtctggaggcacatcggtgccatgtgcgtattcggagcccagcagcgactgccagccttcaatcggtagatagccgtcgcgcgcacccgaacggcaatcgcccgcataggtgcgtgccagttcatcgaccagctcattgccttcgttgccggcgtgacctttgacccatcggaaatccaccgggccagggcgttgcgagatttcacggtcgatcgcctgaataagctctttgttcttcacgggttttttctgtgaatttttccagccattcttcttccagcctttgacccacttggtcgagcaattgatggcgtactgcgaatccgattcgatgagcaatggctcagggcccggatgcgctcgcaaagcttccaacactgcgcacagttcgccaatctggttggtgccgttggtcgcgccgccggcgtcgtagccgtggtcgtcgtgcttatggccaggcttgccgccggcgttctgctcatgatcggcccaggcccagcccattggcccgtttggattccctaatgcggaaccgtctgtggatactgtgatagtcatgttctccaccctaacgcaagctgtgcaatctcttgctgaagtggggctgcccagcgcgaggcaaaacaacgtagtggagggtgtggataacatcacacctattgactttgcttgaaaaacatgccatcgcgcgtgaataggtgagcgctcacaagaaagacaagacatttcctctctgcgggtgaggccggcaacaatggcgcatccggtatctggaatgagaataagggactgtacaaaaccagtgacggcaacatcgaaatcctcaaaccagaggcggacagcgatggttcgacctccacggccgcatccaagggcaccatgcttatcgcaggcaactccaaaaccgtggcactcggtccaggcggcatggccttggctcccggcctgccgctcggtcttggctggttcatccgacgccgcttaggattggatgcctccgacattctggaccgtaagctcggcttgaagtaacggctggttcggacgtgattgctgtcacgtacggatcatgacgacagcgcgaaggtcctcatcggtttacgtcgatgaggaccttcgcgcgcattaggggagtctgttgcgggctgcgctacgcgggtcatgctgcgcgggcgtgctatgcgaacaaactacgcgaacaagtcgttcagtgcctcggcaatcgtcggatgcgtgaacaccatatcgcgcaacgtgctggccggcgcgtcaagatccatcgccaacttgacgatattgatcacctcgtgcgactcgacggaaagcagcatcgcacccagaatgcggccagtattgcgttccacaatcgccttcatcagaccatccggtcgccgcattacctgggccttcggcacagcggccaccggcaatcgcttgaccacataatccaatccagccgccttcgcctcgcgctcattcaatcccacgcgcgagtaaggcgtggcgaggaatgtgctcgacggcacatgcttgcggtccttcaccgtgtacggacggtcggaaccattgagctgcgaccacaccacgcgatagtcatccagcgaaatgtacgtgtgctgcgggccgccgttcacatcgcccagagcccaaatgtcggctgctgtggtgcgcagaagatcgtcgactttcacggcaccgcgttcggtgagctccacgccagctgcctcaagatgcagtccctcgacgttcggcgtacgtccggtggccaccagtaccgcgtcggtggtcaggcagaatcgggcttcagccggctcggcgaaccgcggctcgccatcgtctgatggtttcgtttgaacgtgtgacatcgtggcgtgatcggtcgggttgctagtggggctggtggttgttgtagtgtcggtggcgccggtggcgtcggtggcaccggtgatatcggtatgagcgttcccggtgccggcgggggtggaatcgcaagcttgcgatgcgccgcgagtcatacccttcaccgcaacggacaacctgacgccgccgtcagcagcaggcgcgatggccttggtatccgcgttgaacaggaacttgacgccctgcgcttccaactgtgcgcgaatcgcggccgccacatccgcatcctcgcgcggcaggaactcggcattgtgctgcagcacggtaaccgccgtgccgaaatcggcaaacatcgaggcaaactcaagtccaatgaatcctgaaccgataatcaccagtcgctgcggcatatcgtcgagatccatcagtccagtgctggtgtagacgccgggcgtagtgtggataccgggaatatccggaatgcgcggcgtggcaccggtattgatgaagatcttgctggcggtcacggcgaccgggccctcagcggtggcgatttccacgctatgagggccggtgaagtgagcgcggccggtgattacggtgatgttgtcttggtcggcgagcttgtgatagttcttgtcgcgcagcatcgaagtgacgcggcgcttctccttgatagcagcctcgaacgctgcttcgcgggtttcgggagtactgttcgcgccatcccgccgcgcctgttcggcggacaaaatcagtgacttggacggcaagcatccgatattgatgcaggtgccgccgtacatgtcggcgcttgcctcggcgacgacgaccttgcggccggctgcactgagcttggcagccaaggttttgccgcccttgccgaatccaatgatcagggcgtcggtggtgatagtgggggaggtgttgggtgtgctgatggcattgggtgtgctgatggacatggttacttccttacgtattcgagtgataagagtgcgttgtgctgatgtgttgtgtgccgtgcggcgtctgttttcttctttgactgccgaagcgttatcgactgatgctggctaggggaaacgcgcgggattattagcctttgcgctcgctgaatatctgttcggtgatgtcgtggatggtggtgtgttcgagttgttcgaggcaagtgcggttgagcccggcatagatgtcgttcatcactgcgcccattgaagatgacaccagacagtcctcgtgtacgtcgcccggtgtccagttcactttcacaaaagtggtgccggtggcttccgctaccgcgcgcaaagtgatttcggcggcgggccgggccagagcgtacccgccttcagcaccctctttagtggcgatgagtccggctgaggcgagcggtcgcattactttgcgcacgcgcgccgcattggtacatatgttctcggccaggatctgactgggcaggtgtgtggcgcgatggtcaaggtagaccaatgcgtgcactgccagtgaatggtcgccgttcatgaaacgacctccttaccgagtcgatactgtaactatgatgtgtacagttatgatactgtaatcatatcagatacagttagtgtgtcaaatcggggttgaagaggtggatgactatgtgtataagtgaggtgtccacatggttatccacaatgaatgtgcgtaagtgaagctaggaccacatacctcggatcggcttccgtttccgcacccactacccatatggtggtgtcatgaacaggatgaccgacggcatcaccaactatggagctctgccaggctctatatacgatcagcctccggaagaatcggaggcggtttttgttccgcctgaatttgcggggtcattttctactgactcgaaatacccgacttctcgcgactcgtcatcgccgaacagtggtgcacatgattctgcagcgacaccgaccatgagcgaaagcctcgcccagcgcagacgcgacatggtcgcacgctgcactgaggaagcgaaacgggcgggcaagaagctgcttttcggcatgaccacttccctcgctctgcaatccgtaccgattcccgccgattgcgacctcgactcggccaagctgcacactgtatccagcgttaagagcaagcggtttcgtacacgccatgcaccactgcaaacgcatatttggaaacatgcggctaaagccgccaatgtggaaatgaaccaacacgtgtttgcgctggacctgtttcacgtatgggcccaacttgccccgtatgtttcttttgagtccctgattgtgctcggggatgccgccatcgctgctacgagcaaacagccagtattggccaaggatcgtgatgctgctgcaatctatcaggatctggtgaggttcgtggagcaatttacccgattcagagggcgcccgtcctgcgttcgagcattgcctctgatatcacctggtgctgattcgcccaaagaatcagaagaacgactctctctggtagcgcatgggattccacggccggttgcgaactatgtggtgccggacgcggcttttgcatctggagctcccataacgttggacttagcgtggccggagttcaaggtcgctgttgaatatgatggcgatcatcatcgtacgagtaagactcaatggcgccgtgaccaagagaaaaggggtgtgctggtcgggcggagatggctggtcttcgtcgccacggcggcaagtatcgctaacgaggacgctcgtgctgaattcgctttcaatgtggcgagggcgcttgcttcgcgcggtgccgtattcgagtttcatgtagttgccatgtctcttgaagagttgtcgcagagcctgctgtgaccataatgtccgaaacggactgatgtaaaggcaatatttgtacgacctgttgttgtggtgtgtgcttgatattgcatgccgttcgattgcgatgcctcgtagtgatggatttcgtgaatgactagtgttcgattgtggagggaaatgtgtcatagtggtcgattgggggtgttgtcggtgcattgagcgtggatttgcgccaatgggtgtgggacgctacgcgtgttttgccgatttttgcgtggcgtcccacggcccctcgggtaatggctgtgacgggtgtggcaggaatggcgtctttccggggtttccagtttgagcgtgtgggatggggaaaatgtaaaacgattgacttagctgttgtcccacgcttttgtgggatggcaactctggaatgggcaaattcgtcgtggcgtcccacaacgatgttaaaactcgaccatgatgcaagccgaccgaacgcttcggtggtcatctggccgctgtgaccccacaatgatgatgggaaactcggtcataatgtaggcaggcgaacgtttcgcggccatatggccgtcctgccctgcagtgatgttgagaaaatgcggtcacggtgcatgaggagaaccgttgacctgcgtgtttcagtggtcgcgaactgcatatgcgctaaaaaaagctctgcagtggattgcatgaatccaatgcagagccttattggttgctgtgaacgcgactaacgcagcgatttcactcgctcagggccttgtctaccacgacggtggcctcgtcgagcaccttgtccagagcctcgggggagacgaaggactcggcgtacaccttgtagatgttctcggtgccggaggggcgggcggcgaaccagttgtccttggtggtgaccttcagaccgccgatcttggcgtggttgcccggtgcctcggtcagcttggcggtgatgtcttcgccagccagctgcgtggcggccacatcatcaccggtcagcttggcgaacttggccttctgctccagcgtggtcggggtgtcgacgcgcttgtaccaagactcgccgaagcgctcgacctgctcctggtgaagctgggccgggttcttgccggtcttggcggtgatctcggcggccagcaggtcggggatcagaccatccttatcggtggtccacacgcggccgtccttgcgcaggaagctcatgccggagctctcctcgccgccgaaggcgacttcgccgctgaacagcgggtccacgaaccacttgaagcccaccggcacttcgatgaccttcgcgttgatcgatgcggccacgcggtcgatcagggaagaggagaccagcgtcttgcccacggctgcgccctcaggccagcccggacggttgccgccgaacaggtactccacgcacacggcgatgtagtggttcgggttcatcacgccccagttcgggcagacgatgccgtgacggtcggcgtccgggtcggtgccgccgaccagatcgtacttgtcccaagcgccggcgttgagctcgtcgaccaggcccttcatggcgtacggggaagacgggtccatgcgaatcttaccgtcgtggtcgatggtcatgaagcgccaggtcgggtcgacctcaggacgcaccacgccgatgttcaggtcgtacttctcgttgatgagcggccagtagttcacggaagcgccgccgagcggatcgatgcccagacgcacgccggagttgcggatcacgtcgaagtcgatgacgttctccaggtcgtccacgtagtgctcgcggaagtcgaagccctcgacgtactcggacttgatggcctcctcgtagggcacacgcttgatggacttgaagtcgccgagcagctcgttggcgcgagcggcgatggcgttggtggtctcggccggggccgggccgccggtgacggggtcgtacttaaagccaccgtcggtgggcgggttgtgggacggcgtgacgacgatgccgtcggcgaggccctcgccctcgaagcgctgggtgccgtcgaccgcacggttgtgggtcaggatggcctgggagaccaccggggtgggcacgaagtcgtcacgggagtcgacgcgcacgtgcacgccgttggcgacgagcacctcgatggcggtcttcttggccgggccggacagcgcgtgggtgtcggagccgaggtacagcgggccggtgacgccggccttcttgcggtattcggcgatggcctgggagatggcgatgatgtgggcctcgttgaacgaggtcttcagggacgatccgcggtgaccggaggtgccgaagatgacacgctgctcggggacttcgggatcggggacgaggtcatagtacttgccgataacctcatcgacattaatcagatctgctggggtggcgggctgacccgcattgtttgctaccatgttccctattctgccacgtttttcgccactttgggtgctcttatgttaagagttgtcaacttttgtgcgaatcgtgtgccggttgtctagcgcttggtcatttccttctcgatttcctccagcgacttgcccttggtctcgggcaccaagcgcagcacgaacgggatggacagggccgagaacacgccgaaaatcgcgaacgggccgcccacattgttgccgaacgcatcgagcagcacgaggaagaactgggagacgatgaagttgcccagccagttcgccgccgagccgaaggatgagccgatgccgcgcacgctcagcgggaagatctcgccgataagcacccaggcgatcgggccccacgagaccgcaaagccgaggatatagaaagcgatgagaatcatcgtcggcactgccagcacggccacgtcgcccacgaagttcatcacggcgagcaccgcgagcgaaacggtcatcacgatggaaccgaagatcagcatgcccttgcgcgggaaacgatccatgataagcgtggccacgatggtgctcacgaagttcaccacgccgatgcccaccgacacccagatcgcgtcgccttcagggaagccgaagcccttgatgaacacctgcggcaggaagtagatcaccgagttgatgcccacgagctgctggaacagcatgataccgatggcggccaccagcgccggacgagcgatacggaacagttcgcgcacaccacccttggtgtcctgtgcggccacggccttgatttcgtccagctcaatctgcacctgggtctgatccacgtccttgcgaatcagcgtaagcactttgaaggcgttgcgggtgtcgcccttgttcaccagataacgcggggattcgggcagcaacaggccgccgagcagcaacaaggcggccggcaccagcgccgaaccgagcatccagcgccagtcgcggatgccgaagaggttgtggttcaggaatccgaggttggaggcgtaggccagcagaatgccgaaggtgaccatgagctggaacagcgtggacagtgagccgcgacgctccttcggcgccagttcggccaagtacgccggggtcagggcggaggccgcgccgacggcgagacccaggatgatgcgggcgcacaccatcatcgcgaatccggtggaggaggcgcacaggcctgagccgagcaggaacagcagcgcggagacgatgagcagcttcttgcggccgaaccggtcagacagtgcgccgatcgacagcgcgcctgcgcacgagccgatcagcaccgaggaggtgatgaagccggtctgagagacgctcaggccgaagtccgattcgataagcggggaggcgccggagatgatgccggtgtcgaaaccgaacagcatgccgccgagcgcgccgaaggtgaagatgaatgcgctgttgagcgggaagcgcgtggagaagccgtgcgattcggcggcttcgaggtcctcgattgcgttggctgccgcgtttgtggccgcgcccgccactccggccacgccggtttcgatggtttcgattgcggtggccgccgcaccggttgcgctggtttcctgcgccgcggatgccgtctgtttcgatacgggtgatgccgttgtcgtcgtcattgccttgtcctttcgccgttgacggaccgcgcctgttgcgtggcccctctgccgcgtgcaaggtcaggcttcgattgtctgaagtcgcccgaaaacaaaaaaagacctggaacaacgtggaattcgcatattacgatacgcaaattccacgtcgctccaggtcttgcctcgttttgagtaacaaccctgctacgcaacgtgtgtgaaagatagaatacgacttccgcagtcgcgacactccgaataggcagcaaaaaacgatgatttttgacaacgattgcaggattctgcatggtggaatgatgtcggaatgggcgctgcggcaaatacggagaacgggtgtggcgaagcatcatcgcggaacattatggcgggacaccatcgcggagcaccgtagcgcatagttgccgtttcgcgatgctttgccggcattgccgtgcttttggggcacccagcgccgataatggaacacagtggcatacggcagcaaggaggaaccgtggcgaacgcatcgaacgcaacgcctgcagtgattgcggcgcgcatcgtcgatgccgtcggcggccccgcgaacattaccagcctgacccattgcgccacgcgactgcacttcgaactggccgatgccggccatgtcaaccagcacggtcttgaatccatccccggagtcctcggtgcattcccgcgagccggcaatcgttatcaggtcatcatcggcggagcggtcgcctcggtgtacgagcagatcgttcggctgcggacggcgcgattgatgccggcagcgcaattgccatcggcagtgatgcagtcagcgtcgcagtcaacgcaacccactcagtcaatgcagcccactcagccagcgcagcccgcgcagtcagcgcaatccacacagcccacgcaacccgcgcagtccgcgccgtacctttccgacgatgccgcaccatcgcgcgatactgccaccgacgccgaacaaagttgcggcccatccaatacatcccgtcacttcacgcctcgtaccgtccgcgagtggggcagtgccgcccgcgcttgggctgccgcgtttttcgactacctgtctgactcgttccgcccgattctgggtgtactgctcggtgcctcgctggtcatcgccatcgtcaacgtgatcgttgcactcggcatcgtgcctgacggcgagacctccgccggctggatactactcaaggcgatttgggagggtgtgttcaccgttctgccgattatgatcgcctacaatgcggccaagaaactggacgtcgacccctggctcggcggcgcgattatggccgcgctgatgaccccgcagtttactggcgtgatgtccggaatgtccggaatgtccgggacgtccgtatccagcgccctctccggggcgattcaatgctcggccaacgccgtattcggcaccgaaacctgcaccgtgtcggcgttcggcataccgattcaactcaacgactacggcggcaacgtcttcgtgccgttgctcatggctgccgtgctcgccgtggtctaccacgggttgaagcgcgtcattcccgacagcgtacagctggtgttcgtgccattcctctcactggtcgtcgtttttgcgctcaccatactggtcatcgggcctctgggaatatggctcggcggtgggctgggagcggccacagcatggcttaacgcgcacgtgccgttcctattcgcgctcatcatcccgatgctctacccgtttctcgtgccgctcggtctgcactggccgttgaatgccctgatgctgatgaacattcaggcgctcggctacgatttcgtccaaggtccgatgggtgtatggaactttgcctgcttcggtgccaccgctggcgtgctcgtgctggccgtacgcggcaaggattcggccatgcggcagaccgcggtgggggcgttgctcgcgggattgctgggtggcgtttcggaactgagcctgtacggcatccatctgcatcaccgccgcgtctaccgctggctgctcgccggctgcgcggccggcggcgtgaccagcgcggtgcttggctggctgttcccgtccgtgctgccatccggtcagatggtccggggcgtcacgactacggcgttcgccttctcctcgttgctgacgattccggtgtttgacagaatgtgggtgtacgcgctgtccatcgccgttgcgtttgtaatggcgatggtgctgacggtgctgttcgggtaccgtacgccgccgcgcgccacggaggcgcagatggtctcggcgggcgagaacgtacgctcgcaggatgcggtgagagggattggcgcgacatcgtcggatgcggagtctgcggaagattccccatcgcggcctgcctccgatcggactcctgactccaacgccatcctgtcgcctgtcgccggccggttgatgaatctggaagcgactggcgatccggtgttcgcctcccgcgcgctgggggagggtgtaggcgtcgtgccggagacggccggcgagacggccgtgctagcaccggtcagtggcacgctgaaaaccgtggcccggaccggccatgccttcggcattaaaaccgatgacggcatcgaagtgctggttcatgtcggcattgacaccgtcaatatggatggcgagggattcgtcgtggccgtgggcaaaggcgagcggatcgcggcgggagagccactggccaccgtggatttcggcaaagtcgcggcggccgggcacagcgttgtggtggtggtgacggtggtcaacgccgctgaactgaccgtggtcacgccgttgatcggcgacggtagcagcgacgacaacggcggcgactgcaaaaccgtatcagccggcagcccgatcatcgatgtggaacaatgacgttgcgaaaggatgccatggaaatactgcgagtgttcaacaacaacgtcgtgctcgccaaaggcggcgacggcggtgaggtgattctcaccggccgcggactggggttccaggccaagccggggcagacggtcgacgagtcgaaagttgtgcgcaccttcgtgccattggacgggcgcgaccctgaccatctggcgcagatgctggcggacattccgcccgaaatcatccgcgtggtcgtcgaatccatgcaggagaccggactgggggagcgcgagaccggcagcaccacgctggtcatggccctgtcggaccacgtggcgaatgcggtggagcgggtgcggcgcggcatcgacatcacctacccgctgctcggcgaggtgagcaacctgtacccgcaggaatacgcgcaggggcgtgcgatgctcgcatcgctcaatgcacggctcgacgtcacgctgccggacggcgaggccaccgcgcttgccatgcatctggtcaacgccggcttcgccaccggcgacctgtcctatacgtacacgatgacgggcgtgatccagcaactgcttgacatcatcgaccacagctacggcatcacgttggaccgcggttccgtgaacgtgggccggttcatcacccacctgcgctacctgttcgtacgcatccaccagcaccagcaactgacggacgagccggcaccggtgatgaaggtgattcgtgagtcctaccccgctgcgctgcgatgcgcgcgaaccatcgcctccctgctcgaactgcgcctcgacacggatatcagcgacgacgaaatcgcttatttggcgatgcatgtcgcccgagtcaccggccacgcatcgtagtaacggattagcggattggcgaatcagcgaatcggctcgagtgtaccggtcatttcggcgaaattcgaggtggcatttgaagcagcggcctgcgcggtcttttccagcgcggaggcgtcgggcacgcgcacgatcagcgcgcggtgatccaccgagaaacggatgtggcgggtttccggcagcatgtcaccgtccacctgcgctttggccggcttttccaatgtgatttcggcactgacaccctggacctgttcgatggtcgagttcgtggacagcgggttctgttcgggcttgccgatgatcgtctggtgcaccacgtcgccgaacaggttggcccagccgaggatgccgccggtggtgtcgatgatttcgaagtccagcagaccatcgtcataggatgccgccggcatcagcgagaacatgggaatctggccgcagttgccggccatcaccgtgcggaaatcgagattcttgatggtgtgggtcgagccgtcggcgctggtgactgtcagcgtgccgcggaacttcggcgcgaacaggttcttcacgccgcccacgaagtaggcgagccagctgatgttcgccttgagctcggggttggtgtcgtcgatcatggccgcatcgaagccgatgccggcgatgatgaggaaggcgtggccgtggtcgtcctccgggtggtcgagcagggtgagacggcccatgtccaccaggcgggagccgtgggaggtggccacggtcagcgcggcgtcgatatcgtccacgggaacgcccatattgcgggcaaacaggttgccggtgccgatggggatgatgcccagcgcatggccggtgccggagacggcgctcgccaccgtgcgcaccgtgccgtcgccgccgaccgcgatcaccacgtcggcgccgtcctccagcgcctcaagcgcgcagaccctgccgtccttgtcaagctgggtgtcgtagaagcggatgcgattgagccccttggcctcgcagaacctctggatatgcagccggcgggcttcggcctgcggtttggacggattcacgatgaaggcgtactgcacctcgtcgtcccggcgcttctccagcgtctgagccagcttgcggcggcgctgcgcgcgcagagcgatgacgatgacggcgatgagcaccaccacaatggcgattgcggcgatgatcagaaacacggtgagggcaggctgaggcatggctcctattgttatcggtggggaggtcgtttgcggccatggtgcgccgtacgtgaacatttcctgcacgcaacagccccgtggggcgcgattatggttcaatcgcgtctcatctgacgaaattggccgggtggacccgtccgcggactttcccgggcttccctgtgatttccgcgtgactcccgcgcattcggccattgtcggtgtctgcttacgcggctagtctggtgcccatgcttgatattcaattcatccgtgaacacaccgatatcgtcaaggaatcccagcgcaagcgcggcgagtccgtggagctcgtcgacgaagtgctctcctccgacaccgcacgtcgtgaggcgctgaaggccttcgaagaggctcgcgcccagcagaaggaaatcggcaagaaggtcgcctccgccccggcggacgagaaggccaagctcatcgccgagaccaaggaactgtcccagaaggtctccgaatacaagtccaaggccgattccgccgccgaggaatacaccaccgccatgtggaagctctccaacatcgtggagcccgaagctcccgaaggcggcgaggacgactacgtggtcgtcaagaaggttggccagattcgcgacttcgcggccgaaggcttcgagcccaaggaccacctgaccctcggcaccggcgtggccggcatcgacatgcgccgcggcgtcaaggtcggcggctcccgcttctacttcctgcgtggccaggtggcccgtatgcagatcgccatgctcaccatggccgtggaccaggccgaggagcacggcttcacgctggccatcaccccgacgctggtgcgccccgaggtcatgcgcggcaccggcttcctgaactcccacgccgacgagatctaccgtctgcgcgagcccgacgaccagtacctggtcggcacttccgaagtggcgctcgccggcatgcacgagaacgagatcctcgacctcggcaacggcccgctgcgctactgcggttggtcctcctgctaccgccgcgaggccggtgccgcaggcaaggacacttccggcatcatccgcgtccaccagttcgacaaggtggagatgttcgtttacgccaagcaggaggactcctacaaggagcacgagcacctgctggccatggaacaggagatgctcgccaaggtcgaggtgccctaccgcatcatcgataccgccgccggcgacctcggttcctccgccgcccgtaagttcgactgcgaggcttgggtgccgacccagggccgttaccgcgagctcacctccacctcgaactgcaccgagtaccaggctcgccgcctgaacatccgcgagcgtatggaagacggcggcacccgcccggtctccaccctgaacggcacgctggccaccacccgttggctggtcgctatcatggagaaccaccagcagaaggacggctccatcgagatcccgaaggccatgcgcgcctacatgggcggcaaggaagttatcgagcccacgaagtgggaggcctgagtctcatcgtgctttagctccctctgatgagggagctgtcagcgtagctgactgagggagagattactgagggagagatcgctgatagccagcaggcgaatccaagaccgaccgcactgccgaatatcaacatccctcccttctgtataatgaatacttgcgcgtgtgaacgcgcatcaggacaggtgtctgagcggcctaaagagacggtcttgaaaaccgttgaggggcaaccctccgcgagttcgaatctcgccctgtccgcgaaccgaggcctgggcaacatgcccaggcctttttttctttttctggaacctgtcttcttgattgccaccggggtgctgatatattggtttgtgatgccgtaacatgcggtgtccccgttgatatgacgggccgatcggcgtgagccgataagaaaaggcccgacgtttgcagcaccgggcctttgcgttgattaccggcttgcgcctttaatcaacaaggttgcaagatgcaatcatatcacgatgcacggtagtctgaccgtgaacgggcgcaccgtgatcgtccatgtgggcgatggcgaggcgaacgccacggttgacggcacgcacttcaacgtgcgtagcctgtggcagctctaccagttgctgagactgctcgtgtagcgtctcattaaggcgcggtgcctccctagtcgggtatcgcgccggcgacctgaaaaccgataatgttggcaagtgcttgcaatttgcggtggacgattgcaagctaacgtcttggattgttgccgctatccaatatctcattaggtctaccggcggaccaaaagtacgttgctttgtaaggggagttaatgaaatgaacaaacccgcacaatcgagcatcgaatcggtttaatgccactcacctcaacgggacgcgcggtaattgttagctaagttgacaataaaagagcaaaggcctaaattagcaatcagtcatcacgctgaggtgatgatttccctaggaaggagtagagatatggtatcgcacaacaagcgcatcgtggctgctcttgccgcggtagcagcaatgggtattggtttggccggttgcggcggcagcgacactgccggcgacacgaagcccggcagcgatggcggtgtggtcaacatcacctatatgcatcgtctgcccgattccgaaggcatgaccttggtcaacgacattgtggccaagtggaacaaggagcacccgaacattcaggtcaaggccaccaagttcgatggcggtcccgccgacatgatcaagaagctcgagaccgacgtcaaggctggcaatgcgccggatctggctcaggtcggttacgccgaggttcctgaggtcttcaccaagggccttctgcaggatgtcaccgatgaggccgccaagtacaaggacgatttcgcttccggcccgttcgcactgatgcaggtggacggcaagacctatggtctgccgcaggacaccggcccgctgacttacttctacaacgccgctgaatttgagaagctcggcatcaccgtgccgaagaccgctgacgagctcattgagaccgccaagaagaccgctgcccaaggcaagtacatcatgaccttccaacctgatgaggccatgatgatgatgtccggccaggccggcgcttccggtccgtggtacaaggtcgacggcaactcctgggttgtcaacacccagactaagggctccaaggccgtggccgatgtctaccagcagctgatcgacaacaaggccgccctcaccaacccgcgttgggatgcatcgtttgataactccattcagtccggtcagctgatcggcaccgtggccgccgcttgggaagccccactgttcatcgattccgccggtggcactggtgctggtgagtggaaggtcacccagctcggtgactggttcggcaatggcaccaagaccggcgccgatggtggttccggtgtggccgtgctcaagggttccaagcacccggccgaagccatggagttccttgactggttcaacacccaggttgatgaccttgtctcccagggccttgtcgtggccgccaccaccgcggatgccaagaccccgcagaagtggtccgactacttcagcggacaggatgtcatggctgagttcaagaccgcgaacgacaacatgggtgacttcacctacatgcctggcttctccgcagtcggcgctgcaatgaagcagaccgccgccaaggctgccgatggttctgccaaggtttcggatgtgttcgacaccgctcagaagacctcggtggatacgctgaagaacctcggtctgtccgtcaaggagtgacctcactaggtcttgtcaacgggccggcttgaaatagccggccgtccaagacctctgatgcctcgcatcaccatagcgaaaggccggggcacatactccggccttccgtattgtttgggggtattgctgcaggggcgctgtggcccttgtcatttgttttactgttctttgcgaagacaggttttgtattatgactgcatccactactcaggcgaagggcaaagcacctaggcgtgccgccgccaagccgaagcggtccggcgctcagaagcgcgagaaccgcaccggctgggcgttcatggcaccgttcgccgtcctgttcactttcgtgttcatcttgcccatcatctgggccatctattccagcttcttccgtcaggtcaccgagggcggtggcgcatacggcggtggcgagctggtcaataaattcgtaggattccagaacttccagtatgctattacttccggcaacttctggtccggcgtcggcagggtgctgctctacaccctgattcaggtgccgatcatgatcatcgccgcactggcgttggccatcgtcatcgactcgttcgtggtcaagcatgtcaccggtttccgtctgggctacttcctgccctacgccatccccggcgtcgtggcctcgattatctgggtctacctgtacaacggccaaatctcgccgatcgtcaagggacttgccgccatcggcgtcaatgtggacttcttcaacaagaacatcgtgctcggctcgatggccaacatcaccacatggaccttcaccggctacaacatgctgattttccttgccgcactgcaggccatcccgcatgacctctatgaggccgcccgtatcgacggcgccaatggttggcagattgccacgaagatcaagctgccgaacgtgcgtggcgcggccctgctggccatgctgctttccatcgtcggcaccattcagctgttcaacgaaccgcagatcatgtctacggctgatccgggtatttccaagtcgtatacaccgatgatgatggccatgaacacttctcagggcaccattaccccgtctggtgacggtccggcctcggccatcgccattgtcatggctctgatcgcaggtgtgcttgccgtgctgtacaccttggccgaaaggaaggtgaacgagtaatgagctccgcaaccgttgaagaacgcgcccgcaaaaaggccgagcgcaagctcgaaaagcagcgtcaggctgcgcaacacgatttgcctcgctccatgcgaccgtccgcggccgtgaagaccctcaccgtggtgctgctggtactggtgttgatctacttcctgttcccgatttactgggccatcatcgcgtccaccaagacgccggcccagatgaccggtagcaacggcatgtggtttgctgtgccgcttgaccagctgcccaatgccatcgccactaactattccaagctgcttggctggactcgtggcaacttctggcgctgggtgctgaactccctgatctactcgggcgtctcggcattgatcggcaccatcgtgtctgtgatggctggctacgccaccgcaaaattcaacttccgcggcaagaacgcggccatcggcatcattatggcctgcatgctcatgccgtccgccctgctgaccatcccgatgtactcgatcttccacacgttgcacctgaccaacactatgctctcgatcatcatcccgtgctgcgtttcgccgttcggcttcttcctgggccgcacgtacgcacagagttcggtgccggacgaactgcttgaagccgcccgcatcgacggcgcgagcgaggcgaggattttcttcaccatcgtgctgaggctcctggccccggccatggtgacgattttcctgttcctgttcgtggccacgtggaacaacttcctgctgccgttgatgatggtgtcttccgacaccttgaagcccgtgaccctcggtctgtacggcatggtctcgctgcccacgttcaccgatcgcggcgccctgatgatgggtgcgttgctcggcgtgctgcccgtgatcgtgctgttcctcggcctccagcgctactggcagtccggcctcgccgccggtgccgtcaagggctgaccaatccgctgcccggcatgtcgtgtcactccttccggtgccgggcaacgtccctcccatattcagtgacacgattccaatcgtccggcgtcaccgtaagcgtcaaggatctgcgcagtcagggtcccagggcccgcgatgacgccggtcattttgtatgcgacgaattcgtcgctttgtagtttttttttgatgaccaaccccacaaaggagcactcatgaccagcaccggccgcttcacgctgcccagtgaagagaattttgccgaaaagaccaaggaactcgccgaattgtggggtgcggacgccatccgcaactccgacggcacgcatctggacgaggcagtgctcgctcttggcaagaaaatctacagcgcctacttcccgacccgcgcccacaacgagtggatcaccctgcacatggacgagaccccgcaggtctacctgctgaccgcccgtatcctggccgagtccaacgcggtggatgtgccgctgatggacggtttcttcgaggaacagctcaagcctaaccgtgacgccgaccctcataagtactgggaagtcgtggaccgcaccacgggcgaggtcgtggacccgtccggctggacgctcgacccgggcgaggacaccgtgcacgtgaccgctgccgtgccgatgcacgaatacacggtgagtttcctggcctacatcatctgggacccggtcgagatgtacaaccatctgaccaacgactggggcgacaaggaacacgagatcccgttcgacatctaccatccggccacccgcaagttcgtgttcgacacgttcgagcagtggcttaaggacagcccgcagaccgatgtggtgcgattcaccacgttcttctaccagttcacgctcctgttcgatgaaaagcgccgcgaaaaggtcgtcgactggtttggttgcgcctgcaccgtaagcccgcgtgcgctggatgatttcgaagccaagtatggctaccgcctgcgcccggaggacttcgtggacggcggtgcctacaactccgcatggcgcgtgcccagaaaagcccagcgcgactggatcgacttcctctccggcttcgtgcgcgaaaacgtcaagcagctcgccgacatgtcccacgccgccggcaaagaggcgatgatgttcctcggcgaccagtggatcggcaccgaaccgtacaaggacggattcgacgaactcggcctggacgccgtggtcggttccatcggcgacggcaccaccacccgcatgatcgccgatattccgggcgtcaagtacaccgaaggccgcttcctgccgtacttcttccccgacacgttctacgagggcaacgatccgagcatcgaaggcctcgacaactggcgcaaggcccgccgcgcgatcctgcgctcgccgatcagccgcatgggctacggcggctacctctccctggccgccaagttcccgaagttcgtggacacggtgacccatatcgccaacgaattccgcgacatccacgaccgcaccggtggggtggccgccgaaggtgagctcaacgtggcgattctgaattcctggggcaagatgcgctcctggatggcgttcaccgtggcacacgccctgcccaacaagcagacctactcctactacggcattctggaatccctgtccggcatgcgcgtgaacgtgcggttcatcagcttcgacgacgtactcgcgcatggcatcgatagcgatatcgacgtaatcatcaacggcggcccggtcgacaccgcattcaccggcggcgatgtgtggaccaacccgaagctcgtggaaaccgtgcgcgcctgggtgcgtggtggcggcgcgttcgtgggcgtgggcgagccgagctcggcaccgcgcttccaagcgggccggttcttccagctggccgacgtgattggcgtggacgaggagcgctatcagaccctctccgtggacaagtacttcccaccggtggtgccggaccacttcatcaccgccgatgtgccggtcgacccggcggcccgcgaggcttgggaacaggccggctaccgcatcccgctgagcggttgcggcggtggccagtccatcaagccgttgggcggcatcgacttcggcgaacccgtgctcaacacgtatccggtcaatgaaaacgtgaccttgctgcgcgcggacggcgggcaggtgcagctcgcgaccaatgattatggcgaaggccgcggtgtgtacatctccggtctgccctattcggcggccaacgcccgactgctggaacgcgtgctgttctacgcctcccacaacgaagacaagtatgcggcttggagctcgtccaacccggagtgcgaggtggcgcacttccccgagcaagggttgtactgcgtaatcaacaacaccgatcagccgcagcggaccacggtgactctggccgatggcaccaccgaggacttcgacctgcccgacagcggcatcgcatggcgtgaagcctgattcccgcgttttggagaacggacccatcatgaccgaaagcaatgaagttttattcggcatcgcctcgcattttgcgctggaaggtgccgtgaccggcatcgaaccttacggagacggccatatcaacaccacctatctggtgaccacggacggcccccgctacatcctccaacagatgaacaccagcatcttccccgatacggtgaatctgatgcgcaatgtcgaactggtcacctccactctcaaggctcagggcaaagagacgctggacattgtgcccaccacctccggcgccacctgggccgagatcgatggcggcgcatggcgcgtctacaagttcatcgaacacaccgtgtcgtacaacctcgtgccgaacccggacgtgttccgcgaggccggcagcgcattcggcgacttccagaacttcctgtccgaattcgacgccagccagctgaccgaaaccatcgcccgcttccacgacaccccgcatcgtttcgaggacttcaaggccgccctcgccgcggacaagctcggccgcgccgccgcatgccagccggaaatcgacttctatctgagccacgccgaccagtatgccgtcgtgatggatgggctcagggacggttcgattccgttgcgcgtgacccacaacgacaccaagctcaacaacatcctcatggacgccaccaccggcaaggcgcgtgcgatcatcgatctcgacaccatcatgcccggctccatgctgttcgacttcggcgattccatacgctttggtgcgtccactgctctggaagacgaaaaggacctcagcaaggtgcatttcagcaccgagctgttccgtgcctacacggaaggattcgtgggcgaactacgtggcagcatcaccgcgcgcgaggccgaactgctgccgttcagcggcaacctgctcaccatggaatgcggcatgcgctttctcgccgactacttggaaggcgatatctactttgccaccaagtaccccgagcacaatctggtgcgcacccgcacccagatcaaactcgtgcaggagatggagcagaaggccagtgaaacccacgccatcgtagccgacatcatggaggctgccaagtgagccgtcagtcgaaccatacccgaaccagcatgatggggggcgagcaatgagcgatcagctgaccgaggtatacgccagcatcgacgccctagtcgattacgccttggatcatctcgacctcgatccacgcaacgcagactggacccgcaaccaaatcttcgccctcttccacctggattcctaccccggacccaaaaccacaacgtcggcggcgtcagtgtcagacgcagtccaagacattgtcggcagccgaagccaggccccctctgacgaaaagacccccgaccccctactcgccgccttccgcgccgccgccacaaccgccggcctcttcgatccggaggaaggcccggcctacgccgacaccatcatgggcatcctctccgccaaccccgccgatctcgacgaccggttcctgctcatcgagcacagggacggcggcatggccgccatgcaatggttctacgactactgtgtggccaacaattatgtcaagcgtgcccagctcgaccggaacccgcgcttcgactcgcacgggctgactgtgaccatcaacctcgccaaacccgaattcaagaacatgaagaaggcggcggccggcaacgccgtgtccggcggctacccgaagtgcacgatctgccatgagaacgagggcttcgccggacgtgacaagcgcacgctgcgcaccctgccggtcacgctcggcggtgagtcatggttctggcagttctcgccctacggctacttcgaccagcacggcatctgcgtgaacaccgaccacacgccgatgcatgtggaccgcgacaccttcggccatctgctcgacttcgtggaccgcttccccggatacttcctcggatgcaacgccgcgctgcctcgcatcggcggctcggtgctcgcccacgaccactaccagggcggcggcgaactgctgccgatgcacaaggccgccacttgggccgccttcacgctcgccgactatccggacgccgtggtcgaaatcctcgactggcccggtaccgccgtgcgtgtggtgtcgaaaaaccgccagagcatcatcgacgtatccgacatcatccgcgaggcatgggtcggttatgacgacgcggcgaacggcatcgccagccatgacgcggacggcaaccgccaatccgccctctcgcccagcgcgatcatcaccgaacgtggctatgagatgagtctcatcttccgcaacaatgcgatcagcgacgagtacccggaaggtattttccatgcacaccccgaatactggccggtcaagcaggagccgattggactgatcgaagcccaaggcctgttcatcctgcccggacggctcgtcgaccagctcggcatcgtcgaggaggcgctcgccgaaggccgcgatttgcccgatgaagtcagcgaattcagtctcgaatgggacgaactcgctgaaacattggccggaaaccgcgaccgcgaggccatccaccaagccgtacgtgacgagctcggcagcgtctgctaccgcatcctcggcaacacggccgtcttcaagcagaaagccaccacgcaaacattcctcgaaagtcttggttttgccactaggtgaaacaggtcaagtgaagtaagctcaatactgaaggaaaaccgaaggcaagtccttccaaaggaggaaacatgaccactgtcctggttacgggcggcgccggattcatcgccacccacaccgatatcgagctgctcgacaagggctacgatgtgatttccgtagacaactacggtaattcgtctcccgtcgcgcttgagcgagtcgagcaaatcaccggcaagccggtcaagcgttatgatggcgacgtgcgcgatgaggcgctcatggagcgtgtcttcaccgagaacgacatcgactgggtcattcatttcgccggactcaaggctgtgggcgagtccgtggccaagccgatcgaatactacgacaacaacctgtattccacgctcgtgctgctgaagacgatgaggaagcacggcgtcaagaagatcatcttctcctcctccgccaccgtgtacggttcgccgaaggaactgccgatcaccgaggagacgccgaccggcggcaccaccaacccgtacggcacctccaagctgttccaggagcagattctgcgcgatgtgcatgtggccgacccctcctggaccatcgtgctgttgcgttacttcaacccggtcggcgcgcacgagtccggcctgctgggcgaggacccgaagggtattccggcgaacctcaccccgtacgtggccaaggtcgcggtcggcgagctcaaggaagtccaggtctacggcgacgactacgacacgcccgacggcactggtgtgcgtgactacatccacgtggtcgacctggccaagggccatgtggccgtcattgaccacatcgacaaggaaggcgtgttcgtctacaacctgggtaccggccacggctactccgtgcttgaggtcatcaaggcttacgagaaggccgccggtcatccgattccgtacacgatcaagccgcgtcgccccggtgacatcgccgcctgctacgccgacgcttccaaggcggagaaggagcttggctggaaggccgagctgaccatcgacgacatggccgcctcctccctcaactggcagaccaagaaccccaacggtttccgcgacgccgagtgatatgagcagatgagctccctctgatgagggagctcatctgtcgtttatcacacaatgcgcctatcggcggcccagcgggtgagctcggtgcgattcgaaagctgaagctttcgcagcaccgagctcacgtgcgtttcgaccgtcttgatcgaaatgaacagttcggccgccacctctttatacgtgtaaccacgcgcgatcagccgcatgacctcctgctcgcgggcggacagccggtccagctcctcatcatgagcccgtgccgcaccatcagcgccgccatcagaccccgccgccggcacaccctggaaggccgaaagcacaaaaccggccagttttggcgagaacacggcatagccctcatgcacctgcttgatggatgaaatcaaatcagcgccggtaatcgtcttggtcacatagccctgggcgccggcgcgaatcaccgcccccacatcctgcggcgcatccgaaaccgacaacgccagaaacacagtggtaggggagtaggggcgcgatttggcgaggatctcggcaccgccgccaccttcaccgccgggcacatgcacatccagcaacaccacctgcggcttggtctgtgcgatcatcgccaccgaaccgggcacgtccgccgcttggccgacgatatcgaaggaatcgcgcaatgtggcgattacgcccgcacggaacatctcatggtcatcgaccacggccacacgaatcttggctgtctcgttctcgctcatcgatgttctccctgcgccgctttcagcgcgatcggcatatgcattctgacctcggtgccccagccggctctggacactatctccactgtaccgccgcgccgtttgacgcggccgataatcgattcgcggatgcccagccggtcgggcggaatggcgtccatatcgaagccttcgccatggtcgcgcacgaacacttcaaccatcgtatcgctggcctcgcaatacaaagacaccggctcgccgccatgcgtgaccgcattgaccaacgcctgacgggtggcgtccagcagcgcatcggtctgggcgctcggccgcgcgtcgcccacggtgaccacctcaatcggcttgccgtgctcgtcctccacttcggcggcgatctgcttcaatccggctcccaccgaacgatccgatgtggaacgttcctgatacagccattcgcgcagctcgcgctcttggctacgcgccagggcgaatacggtggtcggttcctcggagtgcagctgaatcagcgccaacgtttgcagcacgccatcatgcagatgggcggtcatgtccgcgcgctcctcttcgcgttccttcaatgcctgctcgtgggtgagccgttgcagcatcgcgttcgcccacggcatcaccgccaccacgataccgacgatcatcatgaatccgctggcaacaatgcgtcgaggagaggtgccccacccaggaatgctgacattatgcacatacaatgcccatcccatgaaaatcagtgcgatgccgcccaacatagacaacagctgcgtgcctcgcggactaagattcatccatgccagtgcgatgccgcccaaccctaccagcagcggaaacacaatctggacatccgcaccggtgctggtgagcaacagtccagtggccatcaacgcgaaaccggccaatgccacgacggccggtttcggagcacgttggatggcctcggacaatgattccggtgcggcagccgattcgtcgtcatgagcggcaagtggctgattgcctcgcgcaagcggcgcctgattaacgggcactgtgcgagccgcagccgccaccgggtctccggcaggcatgaacacccacaggaatacataagcgatgatgcctgcgccgtagaggacggtcagtgcgatgaacgcaatccgaacccatgccacgccgatgcccaagtgcagggcgatgcccttgcacacgccggtgagccaacggccctgccgggggcgcatcaacggcatgcgcgcgggcagcaatggttcgggagatgacgtcatactcctattgtgccgcgctcagggcgttgcggccggggttttacccggtgttcagggaacaatcagggtgttccccgagcgttgtggcagtggtcgggcggtgtaatggaatcatgagcaatccaaacgcgaatccatatcagccacagccgcagcctggtccgcaaaaaaacaagacatcgcgacgcttcttcacttgggtgcgatccagtggactggttcgcggcgacgaccggtggatcggcggcgtatgcagcggcatcgctttacggcttggctggagccccacattagtacgtgcgttggtgattgtatgtacattgttcttcggttttggcgcagctctgtacgcactcggctggtttctgatgccggatgtacgcgatgggcacatcttggccgaggacctcattgccggccaatgggactggaattgtctgggatgcttcctgttcctcgccgtggcaatcgtgattccaggtgcggggtggggttgtattgcgctcgccgccttagcgctatggctgttggccaaaagcggcattcgccagcaggaagggtacggattcggggcatctgcgccgcgaccggtttcacagcctgtgtcatatccagctccacagcctgtgtcatatccagccgcgcaaccagtacctcaatctcctttgtattcagctccgcaaccttttccacaacctgtttcacaacctgtttcacaacctgtttcacaaaccgcgcctagtgtttcacagcctgtttcacagcctgtttcacagcctgtctatcagtcgatgcccagcgtgatgccgggtactgtgcccggcgcgatgcccggcacagtacccaacgggccgtttgcccccgaccgtatgaatgcgacggcctatgcccccaccgagtccaagcgccgcaagccggcgggctcaatcgtggtcttgagcatactgggccttaccttcctctcctttgccggtctgatgggactgatttgggtaaacgacatgggcattatcggcattatgcgtctgggcaccatctggattgccgcagtatgcatagtgatggggctggtggtcatcattctcggattcagaggacggcgtaccggtggtctgattcctctcggactggttgccggtggatgcgcgctctgcatgaccatcgtttcaggcacgtatggcgtgtactaccgtgatcttggtgccagcggcatcaatactgttgtttcactgagccaatctgtcagtgcgagaaacagcgacggcatgaacgatgtgcaaaaggatggcatcttcgttgccgatgccagcgatgccacgtttgaaacattgcagcaaggtgtggcgttcagcggtgaaaactacaacaccgatcaggcaatcattgattggtccgattgggacaagacacatggaccgcacacggtgaagatgctggatggcaaaacttccatcagtaattgcccggtcggtaccatcaccatagccgcaacacaggcgcaagtgcatatcgttctgccggattcctgcacttacgccttcggcaccgccgactcctactactccacttcgagtgacgttggcggcaaatacgagatggtatacaacaactacatgggtccaagctttgttttcttcgaagctgaaagtgccaccaatgggcctgatcacgaatggttgtataaggaatccgccatgccggacaacggcccagaattaaaaatcaatattccctatgtggtggaagcacgtgtcaacgtggtgtacgcctccgattgggaaggctctacgttccagccgcttgccgatatatacgacggcaacagtacaagcaagaacacaaccgaacaatcggaatgatcaagccgttgcaactaggagatggaatcatgactgatgaaaccaaggaattcgcctccatcgaggatgcgacaccgaccacggccataccttccgaaaccgacgcgaccaccgcgaccacaaccatggtgaccgtcgatgaccgaaccgataccacggtgctgccatccgcagcggatgatgacgaaacggctgtgctgcccgtccccgacaatcatgcggatgcgtcggtctcggatgtggatacgcaggcaacagctgcctctccatcgcccatcgaaccaaccacagatcggattgccctggaaacagttgccgatgccgtggagggagatggtgggccgattccatctgccgatgatgtgccgatgtacgcagcatcttcagcacgacctccctatgggcagtctcagaccgccggcaaaccatgccagcctggggggagctccaagaacgtccagagcgccaagaacgtccagaatgctaaggatgtcaagagtgccaagaacatccagaaacagagcatcagcgcgcctactgtggtattcggactattaggcgtgattatcggcgtgatcgcgctggttttcgggtacatatctccggatcggatgatttcgttgttctcgccgaatccgcaattgctgacggctattatttgcgccgtagtgggactgattctggtaatagtggccgttgtatgggccatagtcggtgccgtcaagaagagaaaatagcgttacaaccattgcattacggtcccagtagaagcacattatgacgggagccgaccgataagagccgaccgttctatgctgatgggggggggaggcatagtaactatgaagcggatttcggtgcggcgggtagcgagcgtcatcgccaccgcgatggcgatgacgctggtattcgccacacttggctgggcgatgatgccgcaatggaacacacggccctacaccaagcacatcgctatcgcttctgccgacaccaccatcacccctgcccatgcgaacattccccacgaggggcgatatcgtacgcgtgaaacccgactatccatcaagaccggcgacggcgtcacgctacccgccgtactacgtgaaccggtcgacgctcccgggccacgcccggcttgtctgttcattcacgggtccggtaccagcggtgccgaggatttcggcgatatcgccaacgccatggcctctgccggcatcgtgaccttggtgccggccaagcgcaacgacaactacaccgtgctgcatcgcgactacccgcgttttgctcgcgaatacgggcgttcgctcgacgtgctgcgtggcataagcggcgtggaccccgccaaaaccggcatctacgccgaatccgaaggcacctggatcgccacgattctaacctcgaaacggcaagacattgcctttgccatacttacatccgcaccggtgttcaatggacgtgagcaaatggccatggctgtcagcgcctatacgcatgaggccggcgcgcccaagcccgtggtcaaagacatggccaaattgatgtcgctggactacgcgccattcgatctggcctatgccgactttgatgccgaccggtatctgaaatccctcaccatgccggtgctggtgaactacggcacctacgatacggccatgcccatcgaacagggggcgcagcggatcatcgccacggccaacaagtccggcaacgagaacgtcaccgtacgctatttcgccggcaaccatcagatgcgggctggtgagggcttattcaccccgaacctgccattggccgaaggctatacgcaagcgctggaaaattgggtgaacggtgtgactgccggaaccaaagccgatggatgggcaacgccccaagtcgccggtgcgacacctcaccagcgcttcgccgcgccgcaacgtaccagatccggtatcgtcggctcgctcggcgtgctggccggtctgatggtggcagggcccgtgctgatcgtgatggcggcgatattaggtattggcttgactgtgttttcttggctacagacgttgctggccgggcgacgtagtgtggcgactgtgcgggccatgcatgcgacgccgagtgggctgggagccgcccaacagcgtacgttgcacggcattgccggcttatctgccggtatcggcacagcggtgatggtgattactgggctgttgtacggctatatgagcgccgtaggcgtatcggctgtattggttatgcctcaaccgcggctgtttgccgtcggatgggtggtgctgcgaatagcgaccatgctgttggtggtgctgtttgcttgggaaatggaacgtgtctggtattgccgcgccgatatcgtcggtgtgcggcgcgtcatatgcgtgatggtagcgctcggcactctcgccacactgatgacactggcattttggggcctattctcgctgtaattctgccgatgtgcgctggtaaatggggcctggcgggcaggctgcgttggtggtctgggtgtggggcgatcggcagattgcgttggcctgggtatggccggccgacgtacatcagtcggggtgtccgatacacagtgaatggctgagtattacgcttgggaggcttcggcctcctctaaggtgtcgaaaccgccgagctggactgtgtgcaacaaggtttcctcagtgatattgcgttgcgggctggctgcggcgcgctcgccaatcatcgcttcgtaacgttcgaaggtctggtcggaatacgtaccaagctcgccgcgcagataggtttcgaatgaggtggcagatggtgtgtcttcggtggtggtgagtgcgcgcatcgcctcgccgagcttggggtagcgctcgcggaaatccttggcccaggcgacctgctgggcgatgacctgttcctgacgggccgcgcgctcttcagagagacgcggaatatacggctctatgttcttcgtgaaattttccggtgcggtggaggccatcatgcggccgtatttttcggtcacgaggttgcggcccacgtggtcggccgcgtcaagatcagcggcatagctggtgagtaatggccgctcccatgtgaggaactgggccaaccgcatctggtggaacaccggccagttgccttggcatgccgcgcgtccaccctcattgttggtgcgctggaactgatcccattcatgacgcacaatagcctcgcgcagttcatcatcagtcagttcgttggtcatcgacgttcctttcactgatacctccctctgatgagggaggtggcacggcgaagccgtggcagagggagcttgaatctacaaacttttaagcaccggatcatcagaggcgatgtggtcctcgacatacgggcgctgccattcgaggaaggtctcgccggacgtggtcaggtgttcgcgtttgagttccttgacgatatccaccgcaatctgctccacaatatcgttgattttctcgattgctggagccgcgcccttgccgccttcgccaaatccggccccgccatagcaggctgccgaactcaatcgcatcacggtttccaactgttcgcccacgttcggcaacagcgcgaacatcgagccagacagcttgcgcaatgctgcgaactgccacttgtaatacggcatatagcccaccaccatcggcacgttaaccaggaacaccaacgaggcggtggcctgcacgaactcgtggatggacagccatgcggccgcgccgtcgccgcgcttcaacgaacgcggcagattatattgaccggcctgggcgatcatgccgagtcgcttggagatcagcgcgagccgcacatcgtcgggcatgttcttgaacccttggcgcgtcttggaaaacagaccggtgggatcggcgaacacctcgccattggtggcggcggccaaggtcgattcctgaagcattagccactcatgcggcgcggtctgcgccggcgcagtgtgatacccggtgatcgactcaaagaagtcaccgatgcggaacacgccgtcacggcgattcgcgccctgtgcgcgcggcgtgacgggggagagcggtgcatcaatcggagtcgtcatcgcttccgccacatcagaggacgccgcgcctgactcggcagtggcggtatcgtgcgtagcggtgccgggggtgggtgcgtttgccgcatcgggtatgacggtggagcctgcacctgcggaggggaatgctccggaagcatcggacctggcatgcgcctcgaacgtcacgcggccttgcgcatccacgctgaacttgcgcggcagtgcctcgtaatcgacctcaagttgctcgccgatcgccgcgtaatcctcatccgtaagccacaggcagaagcgcgggccgaaatcgtggtcctgcgaatacgcatcatcgaatccgtagcattccgagccatgacccaccagaccggcggcgatacgcccggcatactgcggatacttcgccgcaatcatcggcttgcccatctgcgtccagaacgcgcgggccagcttcagtccggacaccgggcatgcggaaacggcctcggccgcgcccgcagaaccggtcgacaccgaaacggtggatggggaagatgccgcgttcgcaccggtcttgccctgtgccgggctgttcggcagccgcgagccggactggggcagcgcgcctgcatcgccggcaacacctgcattgtcaaccgtcaccccggcctgcgccgccgcttcctcggcctgccgcagattgtcggcggtgatacgccagtaatcggtgtccttgccgtaacattcctcgatcacggccagcgcatgccggtatccagtaaccgcatccgcataccgtctctcggcaaagcacacctgcgcgaagcccgccagtgcggaggcataatgcgcggaatgttccagatggccggtgcgatagatttccagcgccttggctgcatgccaatgcgcgtcctccaacttgtgttcggtcagcagggtcaacgccagattcgtgtgcgagctggacacgtcgatatccgcgtccgggttcacgctcgaggcttcgataatgcgcagcgcttcacgcaactccagttccgccttgtcgggccgattcgtctcgctgtagagcatcgacagattgttgtgcagtgctgcgagcctacggtcggtgggcgccagcgaatgccggcagacactctgcgcctgatgatacaaatcctcggcctgatcgtattgtttggccgcgcgcatcgaggtggcgcaattgattagcgtggtggcccacgcctcggatgtgccggtggtcaagcccatacgagcggccagttccagcgctcgctgcacaatccactgattctccttgtgccgaccttgcgagcgatagaagcccatcgtttcgttgagcacggtgagcagtccggcctcgtcgccggcgttttccgcgtccaccatcgcctgttccaagtacgggccggcttcggtggcggccgtgtggcgatcgaaaatcgcgtccagtccgttcaggaattgttgggtatcaaaggttgcgggcgattgatcggcatcgtccgcaacctggttcgccgtggaatcggcaccttgtgctgcggccgccgcatcggtgtcgtcggcatcgtctggaccatgcgcgaattgcgcggcgaattgtttgagcagtgcttcctcatccataccgccagacctccctgaatcgtgtctgatttcagtctattaatactgtgaacaaacacgtcagggagtttgctgtgagcttggtctcagtccaccttggtttcgcgcaagcggtgaatggcgtcggtatcggtttcgcagcgccacgagtagaaggccagcagccctacggcaagcagagccagcggcataccgcccaggccggtatagcgatagttcatcgagaaggtggtgagcatcgcgccgccgacaatcgagccgatggcattgccgaagttaaacgccacctgtacagccgcgccggcgatcagctcgccgccgccctggccggcttcggtcatcagcaattgctgtggagcggaagtaaagaacaatccgatggcgatccagaacgtcagtacagcggtcatcggctgattacccggagtgataagcaccagcaacaagccgaggcaggagatggactgacctattgcggccgcgccggcatgcctccaatggtcggtcagacgacctccaagcagaccgccgatgaccataccaaagccggcaagcatcatcagcatcggcaccagggaagacgaccatccgccggttttctgcagccaaggggagacgtagctccaccagcagaacacaccggcattgccggtgaacacggcggccaaaatcacccacgggccacggcgggtgaggaacttgaactgaccggcgatgcctgcgtccttgatcggtgcaacgtacggaatccacgccgacgccagcacaatcgtcattgccgcccaagcggccaaaatgccgaaggcaagacgccaggaaaggaactcggccatcaaggtgcccgccggtacgccgagcatattggccacggtctgtccggtgaccatcacggatacggcctgcgcctccttgccttcctccgccagagtcttggcgatgagtgtggctgtgccgaagaatgcgccgtgcggcaggccggcgacgaatcgtgcgacgaccagcatggcggcattgacggagaatgcggaagccagattgcccaccaaggcaatcaccataaacaatatgatgaggtccttcggcggcaccttgcggccgaataccagaatcagtgtgccgaagcacacgccgatcgcatacgcggaaatgtaatggcctgcggtggggatgtccacgccggtggcggccgcggcctgcggcagaatgcccatcatcacgaactcggcggcaccgagaatgaacgcgcccgaagccagtgcaagcagactcttcttcatggttcctctaattacttcagtattacttacaaaaacagtgcggcaatcgattgattcgagcgatatattacggtggtccgccaacaaatacgggggcttgccgtgatgtggtttgtcgctgtgtgcggcgggttgtttaccgctgttcgatcgcttggtttgattgttgggacaggaaacgaaaaaccggattgttgatttctcaacaatccggtccagttgtcgggctggcgggatttgaacccgcggcctcttcgtcccgaacgaagcgcgctaccaagctgcgctacagcccgtttggcaacagatgtagatattacattgtggtggtggacaatgcaaatcggcatgtcgcgagtgttgcgtgatggtggattcgccatgtgtacaggtctctcaagccttgtgcagggccggttttgcgtcatgtgagcgggtgttcagatggccgtgcggtctgccgggctcataatcgccggccttgcgtacactgatgaatcatggctgaagttgtcgaaaataccgaaaacactgagaatgaaaccccggccgtcccgcagatgagcaccgtcgaacgtgcggaaatgctgctcaagcaggacgccaccatccgcgagaagatcaagtccggtgccacgctggacgaagccgtggacccctccaacaaggagttcggcccgctggcccaccccgagcaggtgcagatgcgcgtggccaagcgcgcgatgatgcttgaggccggcatcgccccctacccggtgcacttggacgtcaccgacaccatcgaggcggtccgcgccaagtatgacggcaagctcgaggctggcgaagagaccgaagacatggtcggcattgctggccgcgtgctgttcctgcgcaacgcgggcggcctgtgcttcgtgcagctgtccgccggtgacggcaccaagattcagggcatgatctccaagaaggagattggcgccgattcgctcaagcagttcaagcagctcgtcgaccttggcgatcacttgtacctcaagggccgcgtcatcgcctccaagaccggcgagctgtccgtattcgccactgagtgggctatcgcctctaaggccctgcagccgctgccggccctgcacaaggacctgaacgaagacacccgcacccgcaagccgtacatcggcatgatcgcggacgagaacatccgcaacatggtgcgcaaccgctccaaggccgtggcctccctgcgccgcacctttgacgaccacgacttcctcgaggtcgaaaccccgatgctgcagaccctgcacggtggcgcggccgcccgcccgttcaccacgcacatgaacgccttcgaccttgacctgtaccttcgcatcgccccggaactgttcctcaagcgctgcctggtcggcggcatcgatcgcgtgttcgaaatcaaccgtgacttccgcaatgagggcgtcgacgccacgcacgcccccgaattcaccatggtcgaggcctaccaggcctatggcacctatgattccatcggccagctggtcaaggagctcgtgcagaagaccgccatggacgtctacggctcgcacaaggtcaccctgctcgacggcaccgaatacgacttcggcggcgaatggaagaccatcagcatgtacgactccctgtccgaatcgttgggcgaggagatcgtgccgaacggcggcccggacgcccccggcacctccgttgagcacctgggcgccatcgccgacaagctcggcgtagagcgcgacgacgtggagaaccacggcaagctcgtcgaacacctgtgggagcacttctacgaggacaagctttacgagcccaccttcgtgcgtgacttcccggtcgaaacctccccgctggtcaagggccaccgcaccaagcccggcgtggtggagaagtgggatctctacgtgcgcggcttcgagctggctaccggctactccgagctcaacgacccgatcgtgcagcgtgaacgtttcgtggctcaggccaaggacgcgctcgctggcgacgaagaggcttgcgacatcgatgaggacttcctcgaggctctcggcgtgggcatgcctccggccggcggtatgggtatgggtattgatcgactgcttatcgccttgaccggtgccacgattcgcgagaccatcaccttcccgctggtcaagccgctcgttggctgattaggcatactctggctcccctcagagaggggagccgagttatatatgaaagggattgcttatgtccatcggcttgtgggttcggggcgcgcgtcccaagaccttggccacttccatcgcgtcggtgatggttggggcgacgatggcatacgcgcatatcgagcagtcgggcacctgcatcgcaatatatcccgaaccggcctcctgcgccacggcccgtgaacagcagaccctgctgatggaccgattctggccggtgaccatcctgtgcctgctagtcgcgctgttcctgcaaatcgccgtcaactatgcgaacgactattccgatggcatccgcggcactgacgccgggcgtgacacggacgaatcgaaatcaggcaaaacccagcgactgaccgcatccggactggtaccggccaagcatgtactgttcgcggcgatgatttgcgccgccatcgcctgcatatgcggcattgccgctatcgtgatttcccaagcttggtggctgtttgccgtgggtgtggcctccttgctggccggctggttctacaccggtggcaagcatccgtatggatacgtcgggctgggagaagtcggcgtgttcctgttcttcggcttggctgcggtattgggcaccgaatacgcgctgtgcggcacggtggacgtcggcggactattgggtgctgtggcggctggcctgttctcctgcctgatcatgatggtgaacaatatccgtgacatcgacgaggatcgtgagcatggtaagtgcacgctggccgtacggctgggtgaatccggcgcgcgtacgctgctgattgtgtgctgcgtggccgcgtgggccatagccctgctcatgtgcgcgaccctatggtggccgtggggcgcagtgctgttgatctcgggcgtcggaatacctgtgcgcatggtctccagcgtgaataaacgtcaattccgcccggctctgcccgccgccagcttccagaccttgctgtttgcggtggtgctggcggtttccgtgacgctctgagagcgaaataataagacgaatactcgtgtttgggcgcacgcggctgtagactgaaccgtatgacttataaactagtactgctccgtcatggacagagcgcatggaataaaactaaccagttcaccggctgggtcgacgtaccgctgaccgagcagggtgaagccgaagccaagcgtggcggcgagctgctcaaggagaagaacgtccttccggacatcgtgttcacctccctgctgcgtcgcgccatcaacaccgccaacatcgctctggatgccgcagatcgtctgtggattccggttcagcgtgactggcgtctcaacgagcgtcactacggcgctctgcagggcaagaacaagaccgagatccgcgaagagtacggcgacgagaagttcatgctgtggcgccgttcttacgccaccccgccgcccgagatcgacccgaacgaccagtacgcccagaacaacgacccgcgctacgccggcgatccggttccggaagccgagtgcctggccaacgttgttgagcgtgtgaagccgtacttcgagtccgctatcgagccggagctcaaggccggcaagaccgtgctgattgctgcccacggcaactccctccgcgccatcgtcaagatgctggacaacctgtctgaggaagagatcgccaaggtcaacatcccgaccgccatcccgctgctctacgagctggacgagaacttcaagccgatcaagccgcgtggcgagtacctggacccggaggctgctgctgccggtgccgccgctgtcgccgctcagggccagaagtgagcctaagccgctaacacggtacaagctgtaaggggagtcgcacataacgtgcggctcccctttgctatgcctgccaaatcccccatggggcggtgattaccccatggggcggtaaaaccctcatggggcggtatgccagaatggcttaattccgcggtttcacatatccttcaaaccgccccatgggcaagttaccgccctatgggtgttttgccgccccatggatacgccggtgtaccgcccaaaagcaacaaaaaacggcgtccagccgtagccggatcgccgctttcgggcatcctcctcaaaccacaggagaacaagtgttcagttattcgcccaatgtgagaacaagtcccaatcagtcgatgtcggtgccctcgtcgcgggtcggctccttagtggggtcgaagccggagacgatgtacaccacacggcgggcggcggacacggcgtgatcgccgagacgctccaggaagcggcccagcagcacgatatccacggtctgctgacgggtgatgtcatcggacagcgctagatcgaaggtctggcggtgcagattgtccagcttgtcgtcagccaggatgatggcctcggcggtcttggcatcgcgatcgaagagcatggccaccagctggtcagcggtgttgtccaggaagtcgatcatctcggcgaacaccggttgagcggattcaggaatcgcggcggccggataggtgcggcgagcggcctcggccacgtggcgggcaagatcgcccatacgctcgaacgtggaagccagacgcatggtggaaacgaccacacgcagatcggtggccaccggattctgcttggcgagcaacttgacgcactggtcaatcacagaggactccagggcatcgatttcgatgtcgccgtcaatcacagtctgtgcggcttcaacgtcctgattcagcagggcttctccagctcctttgatcgccttgcgtacgttctgcgccatacggtcgaggtcgtcagcaacctgcttcagctcctcgttgaaaataacgcgcatttctctagcctttcatgcttgcttattgcaacctgtaccagtgtattattccagtacttgttccccacttcaacgtaggtaatggcaacctcaagttgttctactgttcattgggttgttcacctgaaattcatgttaccggcgtgccggcaaaccgcaatcccggcgtgtggtgtgaaagaatggggggcatgacacagatgccgctcgtcgccgcgattgctcttattgtcacggctgttttatttgtggtaggaatcatcacgctcatcgtgggatttgcgacacatcgagtgtccatggaatcgccgctggccgatgatgacgacaatgacgatctgtccgacgacaccgccacgctgctgtccatgctgccaggtgcgtccgtggtggtcgacgagcacgacgaggtggtccgctgcaatcccgccgcctaccgcctgggtgtggtgtcagatgacgccattgcccagcagcatgtgctggatgccattcacgaggcgcgcaagtccggtggcaagcgccagttcgacttgaccaccgatactccggagcggtacgtcgcagaccagaacaagggcgatcacgtcgccacgcagtccgtccaccgccccaactggctgaaggtgactgtagggcgtatcaacgagcagttcgtcatcgtgttgattaccgatgtcagtgacgtgattcgtttcgctcaagtgcgtgactcgtttattaccaatgtgtccgagcaattgttgggccccactgaggctctggccaaactcgccgattcgctggagtccggcaatctggacgaacagcaggtggctgccgacgctcgccaggtgcgttccagctgcagcaagctcaaccacatggtgtctgatttgctgctgctcatacgcgcgcaggagccgattacgccgtcttccgccaaccgactgaacgttatggaacagctcagggccacggcggcgcgactggagccgcaggcagccgaggctggcgtgcagctgaacatcaagggcgacgatgatctagtcatcaatggtgaggcggaccagatcgacagcgccgtgaccaagctcatcgaaaacgccatcggctattccaaggaaaatggcgtggtcagcgtgtccgcatccaaagacaaggatggcgaccgcgcggtgattcgcgtgatcgaccaaggcacgggcatcgctaagaaggaccaggcgcgcatcttcgagcggttctaccggggcgtggaacagagcaatcgcacggcggatggcgtgggcctaggcttggccatcgtcaagcatgtggcgctgacccatcatggcgatgtgaccgtatggagcgcgcccgggcaaggcagtacgttcagccttacgttgccgttggcgcagtgaggtaaggaattggtggcatgccttgcatgccaccaatgctgtttgatgagcgacctgcggccgcggtctctccctcaatcagctacgctgacagctcccgtcatcagagggagcttgtgttgcgttactgtccgaggcggcggtagtcccagcggtcgaagtattcccagaccagcagtagcaagccaataatgacgccggccacgcacataatcaccaacggcattacgctgtagcccacggccagcagaatcagcacgacaatcaacgccacaatccatagaccggtaccgatggcaaacaccttacgcagatccacccgtacgggcttgggtgcgggtttgcggacggcagggtcaatgagaggcgcgaacttcatactcatgcactgtagtaagagtagggaggggcgtcaaacatccctccctacgatttattcaatcggcatcagttgagaccgatcaatgtgcatggcatatatggtcggcaatgcgaggcatagaccgccatcacaggtgctcgaccacatagtcgacgcacttggtgaaggccatgacatcagccggttccaccgaggggaacacgccaacgcgcagctggttgcggcccagcttgcggtagccggcggcgtccacaatgccgttctcgcgcaggatggacagtacctgagaggcctggactcgctcgtccagatcaatggtgaccacggcgttcgagcgtgcgtccgcatcgacgacgaacggagcggcgtattcggagcgctcggcccacgagtacaggatggatgcggacttggcgcaacgtgtggtggcccaggcgaggccgccgttgttgttgagccagcgaatctggttttccatcatgatcagggtggccacggcgggcgtattcagggtctgatccttgcgggagttgttcagtgccgtggtcagcgagaggaacggcggcacccagcgatgtgcgccttccagatgagcgcttgattcgacgcctgccgcacgatcgatagcttcgggggagaggatggcgacccacagaccgccatcggcaccgaaggccttctgcggtgagaagtagtagacgtcggtctggctgatgtccacaggcaaagcgccggctgcgctggtgccgtcgatgacggtcaaggcaccagcttcacgacttccggccacgcggcgaatcggggcggccacaccagtggaggtctcgttgtgagcccagcaatatgtgtccacgccctcggtgagctcaggcagacggtaagtgcccggctcgccggggaacagcaccgggtcttcaaggaagggtgcgttcgcggcggacgcggcgaacttggcactgaacgagccatacgtgccgaatgcggcgcgacgggtgatcagcgaagcgcaggcaatctcccagaacgcgctggcgccaccgttgccaagcgccacctcatacccttcaggcaggtggaagaactcgcgcagaccttcacgaatcgaagcgaccagttgcttgactggtgcctggcgatgtgatgtgccaagcagggtggtggcgccggcgtcgagcgcggcgatctgttcagggcggattttgctggggccggagccgaagcgaccatcttcgggcttcagcgactcgggaatactcagtgtgatagtcatggtttcaagggtagaccagtgttggggaatatcgcggataatgctcggtgtgcgggattactgcggggttactgcggaattccggggtgccgggcggcagtggtggcaatgcggaatgcagtgcagaatgtacgcagtacatcatggttacggtgtgtcggaatgacatgagttagtgattcttccgataaccggatagtgaggttcgtgaacgggcggaaacaaggcagttttttcacccggccgcacggttacgtaaatcgtttgacacacccggatggtgggggatcacattgaggattgacctctgttcgttgtacagtactcaattgtgacggtcatacgaggtcatcgaaatgaccccgccgaacccatccaaggagttaacgtagtatgaagcatgcttcgcataaagcgaccacggtctcgcgccagaagttcagcttagcgaaggcattgtttgcctccggcaagggttctcattccgttcgtgctgtgcgtgcggtgcaatccgctggtagcgacgccgttgttttggggcttgatccggccattgccgagaagatcaacgaaatcgctccccagacccgccgttccattcgtgaggccgctcgtgccgctgaacgccgtagccatattcttgcctcggcctcactggccgctctggtcggcacggccgcaggtgctctcgcgttttccaacaatgaagacgccacgaactcgttcgtggctgatccggccacgacgaccacgcagattaagcgcatcagcgatgtgactgcggcttctcgttccgaagcgcgtactgatttgagttcatcctccgttaccgcacagtccaccaatgaaggcggctgggggctgagcaattcagacagcaccttggacgccaagctgatgaatcgcaataatgcgaacaatcctgtggtgtcggctctcgtggatgccgatggcgatgctgtgccggctggcttcaacccgaaccatgccgttggcaccaactccaacaactatccgtggggtcagtgcacgtggtacgcgtaccagcgtcgtgccgaactgggcctgccttccagcggcaacttcggcaatggtggcgcgtgggcggcgtcagcttccgctctgggctattgggtggacaacactcctcgccatgtcggtgatgctgtggtgttcgctcctggccaggccgatgccgatggcgcgtacggccatgttgccgttctggaaaagatcaatgccgacggctccattgagatctccgaatccaatgccaagggattgggtgtgatttcgacccgtacgttcagcgccgccgaagccggtaagttccagtacgttcactactgattcatttcattggcttacattcggtgattactgttcggatgtgacgtcgccctatcggcaatcgttcgcgcgaaatgacatttcaagtgttgcggccgcgtattagtccgaactgacctgtgccgacacgccgatatatcccaatagctccggggtgttttatttcttccatcctgtacgagttaatgcgcaccgtgtagggtgatggttctatgaagaccaaaactgtagcttcttccattgttgccgcgattgtctcctgtgcctgcttgtttatgtttgttcctacagcaactgcagctgagggtgttactgtgacttccaccaagtccttcccctcgtacacccaggtgcgcaaagatctgacgactgaagccactgccacgagcgttgaggacaatgctgattggggcggcattgagaacctcgatgtgccgcagacggaatctcaggcggaaaaggatgccgcagcggccaagaaggctgccgaagaggaggccgagaagcaggcggaggtcgaggctcaggcgacccaggagcaggccaacgccgcgagccgtaatgagtctcgctcttctgttacttattccgatgccagtggttcggtttccgctggtgccggtgcctctatcgaccgtgcgtattctttgatcggacagagcatggactgcaccgcattggtcagtcaagcgttggcggcccgtggcattaacttccacggttggcctgaagagtacgtcaatgttcctggtggccacgtagtcacagacggatccctgcagccgggcgatattctgatttatgccaacaccggtggatggaacggtggtgcacactacgatcatgtggcgttgtatgtcggcaacggtcaggcggtccatggtggatggaatggctatagcgtggctctcgctagtgccatgaccgaaaagctcaccatcgtggtgcgtatcccgtgatgcagtcttattgattgatttattgcaggcctcggatgccgatcggtatccgaggcctgttgcgttctcctgccgaatgatgcacccgcgacatcatcttcgaaatgctattcctgttatgaaatcgacccatgtgtgctagtgtatggcgttgatgatgagcgttaagactattatttccacatcagtggcgattatcgccacgggtgccatgtttgcgtgcgtagccccgtttgcctctgccgattccgcgcagacgagtgctgtggtgtcctcacgttctttcccgaaggcgagttcggtgaagaagaatttgttcgccgaatccacctccacctcggttgatgagaactctaaatggggtggcatcgagactcttgatgtgccacagaccgagtctcagggcgagaaggaagctgctgcagcggcggcggctcagaaagccgctgatgaagctgctgcagcccagtccgctgctgctgcggcagccagccgctctgaacagcgtgcgtcgattccacaggttgacttgggtaaaatgactggcactggcactggcgctgagcttgctagcttctcactgaagttccaaggctatccgtatgttgccggcggcaacactccggcaggatgggattgctccggttttgtgcagtacgtcttctcccagtttggcatctccctgcctcgtacctctggtgctcaagccaccgtgggtactccggtcgcaagcttggcggatgccaagccgggtgacattcttgcgaatggtactcatgcggccatttacatcggtaacggacaggtgatgaatgctatgaacccggtgcagggaacggcagtaagcgacgtttccgtattcggtggagctggatattccattcgccgcgtgatgtgacaagaattatgcggtaagcgaattcgtattaaggcacgtcctttggggtgtgcctttttcgtatacgcggatttctttttgagcggaggataccggccaaaccgagtgtcgcggggtattgttgagatacgcggtattcgtgccgcaataacttcaaggaggtcgtcatgattaacgacaaggctattctcgtcggcgttgacgggtcgcatgccagttacaaggcaacatggtgggccgcgaattatgcaaagcacgcggggctgacgctgcagattgtctgcgcatattccctgccgagctatgccgccgtttcgttcgatgccacttacacggcgatgggggacgataacgccgcgcattccgatgctcaggagattctgtccaaggccaaggccatcgcagacgagcagggcgtcgaagccgccacactgattgttaccggagatccggcatcggtgttcgtcgaattgtctcgtaactacaatctgatcgtcattggcaaccgtggcaagggcggtctggccgagcgcctgctgggcactacgtcctcatcgctgccggcatatgcttactgcccgattgtggtggtgccgtacaccgatgatgacggtaacctgatgcacctgaacaacacgatcaccaaggtggccgtcggctccgacgaatccaagtggggtctgaaggcgctggacattgccgccgacttcgccacgtgctggggtgcggaactggacgtgatttccgctgtgccgaacctgaagggtgtggacggcgaggacgccgtcatggagtcctacaaggacgatcttgaggtgcgcatcaagccgttgcaggaatcgcatcctgatctgaagatcaacaagcagatcgtttccggcccggccgtgagcgccctgaccaaggccagctacgatcacgatgtggttgttgtcggctcccgtggtcgcggcggcttcactggcttgctgctgggctccaccagccagggcctgctgcagcatgcggtcggcccggtgtacgtggtgccacgcaagtatgttgaggccgcggaatcgcgtctcgacaccgtgccgagctcgcccgccgaagtgcctaccaagtcgctggaggagattgccggcgtcgaggagattccggtgtccgcagccgagcctgaagtcgcccagcagatcgaaaagaccatcgatcccgatcgccagtaaagtccgaatatacggaaagaggctcccgccagggagcctcttcaatttatatcccgtctcagtgcttgacggtgacgttcatgcgcaccggggtctcctgcacgtaggtgtgcttgaccgtgcaacccttgtcgatatggcgggtgacgcgctccttgagcttgtcggcatcctcctcggacagaccggcgtcggaagcatcaatcaccacctgctcctcgaaaccggtgtaggcgtcattttccgggtcgtacgtgccatccaccacaatcttggcacccttgccctcacccagcgtatgttcgatggcgaactggctggacagcgcggcgcaaccggccagcgcgaccttcatcagatcgcccggcgtgaactggccacgatccttgccgaacttaatgtgtgcgccatcgtcgctgaacgcatcccacgaaccgtccttgttacgctcaacccacagtcgcttacccatagctgctcctttattttcagccgccggcgatctggcccatcgccatgccagcgggggagcgcggcacctggccgctctcccgcatcagtggacttctctattatgcccctaagctacactggtgcacatggctttgaccgaagaacaactcgcagatattcgctcccgtatccccgcacgtcccgaaacggacattccgatgccctatgaggacctggtgcgcaagatcctgaccgaaggcacgctgaagtccgatcgcaccggcaccggcacgatttccctgttcggccagcagatgcgctttgacctgtcgaagtacttcccgttgctgaccaccaagaccgtgttcttcaaaggcctggcctatgagctgctgtggtttttgaagggttcctccaacatcaactggctgctggagcacaacgtgcatatttgggatgagtgggcggacgagaacggcgatctgggcccggtctatggcgtgcagtggcgttcctggcccgcgccgacccccgaggacccgaatcgcaccatcgaccagatctccaatgtgctcgacctcatcaagcatcatccggattcgcgccgcatgatcgtctccgcgtggaatccggccgaggtggagaagatggcgttgccgccctgccacgcgctcttccagttctacgtggccgacgacaagctaagctgccagctgtaccagcgttcctgcgacatgttcctcggcgtgccgttcaatatcgcctcctactcgctgctcaccatgatgatggcgcagcaggccgggctcaagccgggcgaattcgtctggaccggcggcgactgccatgtttacgacaaccacgtcgaccagttccttgagcagctgggccgcaagccctacccgtacccgaccatcgagatccgtaaggccgattccctgttcgactaccagtatgaggacttcaaggtcgtcggctaccagcatcaccccactattaaggcacctgttgcggtctgatgctgattaccgtttcgtggacagcgaatactgtgaaggtgacggcccccgagtcttcgctgtccactacactaaggcccagttccgcaatccaggaggagtaagcgaaatggagcatgacagtagccgtagcggctatcacgaacccgagcccggatctgccgggctgtctgccactgaagaagactggggtgacgattatcccaagaccttctcggtgaatcttatctgggccgaagcccgtgacaaggaaggtcgcgccggtgccatcggcctcaatggtggcatgccttggcactgtgccgaggatatgaagcatttcaaggagctgaccgtctcccatccggtgattatgggtcgtaagacctgggaatcgctggggggcaagtaccggccgctgcccaaccgcgacaacatcgtcgtttcccacgatccgatgtaccgtgcgccgggggccactgtggtcaccagtcttgacgacgcgctcgatatggcccgtcaggaggcgattccggacgacggtctggaccgttcggagatttggatcatcggcggcgcccagttgttcgccaaggctttgccgttcgcggacaaagcctatgtgactgatctggccgccaccgtggatgccgacagctacgcgcccgatatggcgtcgctggtcgaggccgggatgtggcgggaagccgaagtgggcgagtggcatacgcccgccaaggaggagtccggcatcgattcctatcgtttccgtatcttggccaaaaccaagtaagcatgcgaatccggcttatgccctttatagcggcatgagccggattcatattcattcgaccccaacaatacagtcgggccgtgtgcggcccggtgaagcccgattgaggattgattcaaagctatgagcaatacccagccctacaccgtaatgaccgtctgcaccggcaatatctgccgttcgcctatgggtgagatcattctgcgtcacttctttaatgagcgcggtcttggcgaccaggtgaacgtggaatccagcggtgtgtccgacgaggagtggagccacccgatcgacccgcgtgccgtgcgcgtgctacgcgaacgtggctatggtgatgagattccgcgtgaccacttcgcacaccgcatctcgcgtgaggaaatcgaccgtactgacctgttcctgccgatgaccgcctcccacatgcgcgccctgctgcgcatgctgccggccggcaagcgcgccgaagtgcacatgtaccgcagcttcgacccgaatctgcccaagccgaagcccggccgcgaagatcagatcgatctggtggacccgtggtacggcggcaagcacgagttcgaggtcgccatcgaccagattgaggaagtcgccccgtacatcgtcgattgggtggcgaagcagctgtaggaatcggcctgtggccgatgctgtgtgtttcgcagtcttacgactgcgggtctctacctccgtcaccgcttcgcggtgccgcctccctcgtcagaggaaggtacagaagattacctccctctgtaagggaggtgctgagcatagcgaagcggagggagagactaacgagtcgggtgcctcagaacaccagttgcaccagcaacatatatacaattgtgccgccggcgattgaaagcagcatattgcgtttccatacgtgcagcagcacgatgacggtgcaggcgatgagttccggaaggccgtgtgaaccggtcagaatcggggtgttgcgcagtgcgtataccaccagtagaccggtcatcgcatagggcaggacctggccgaaatactcgatgatgcgcggcggctgcttggactcgggaaacaccagaaacggcagaaaacgggtgcacatcgtgcccagcaccaccgtcacgatagtgattgcgccttgccagatggtcatcgtcatcgcgtctgtccttccttctgctggtccgctgcgtggctcatggcatggtctgccgtggcttccggggcgtcggcggccggccgcaacacgtccagatgcgggcgtagcgcgacgaacagtatcagcatggcgatcattgagggaatcatgaaatcattggccccgaatatcagcaggcaggccagtgatgtcagcacaccgatgacggcggacagtcgctcgcgatgcttgccgtcgagccactgatcgaggaagatcaccagaaacagcgcggtcagtacgaaatcaagaccgtcggtattgaacggcagatgcgcgccgatcagcccgcccagtgtggcgccggtcacccaatacagctgattgcacagcgtaacccagaagtagaaccagccacggtcgatgccggcggggattttcgcggtggagttgatggcaaaagtctcgtcgcacataccgaaaatcaggtatgggcgcttccagccgagccctttgaatttgccgagcatggatagtccataaaacaggtgacgggcgttgaccatcagggccagcagaaagccggcgagcgggttgaacgcggagagcagcagattcaccgtgacgaattccattgaaccggcgaagatgaacgcgctcatacacatcggccatacgaaggagaagcctttggtgcccatgagaatgccatacgaggcgccgagaaacaggaaccccaggcaaatcggtatggtcagcggaaacgccgctttgagcgccggcagccaggcgttggtgttggtgttggcggtgtctgccatgtggatgatgttctccttgtacaactggtctgccggccgatgttcgccgatgatgccatatgcggttatacacgcatggtgtcgataaacggggtgagggtggcgtcgggaccctgtgcgcgaagtcacagtgtggaggatgtcacatcgtctacggtgggatagtccttgtggcgggcgcgaacacgtgctgagatgaaaccatgagcacatatcaagcgggccgaatgctttcagacctggtcccgcgaatacgaaaagacctcggtcgctatgaccggggtctttagtgaagtacccccagagagagtcgaactctcgttgtcagattgaaagtctggtgtcctaaccgttagacgatgggggcgaacaactcgaattactttacgggaggttgttcggttatgcaaatcgacggcatttcggcgtgtcgcaatcagttcagggtaacggcctgataggtgaagtcatgaatcacgcggccggcggccaggcccttcttctcgaagttggtgagcacgcggccctcgaatcgctcggattcggtgaagtcggcgtgcggcatatcggcggccatgtcggcattgcccttgcccacgtgctccagcggcaggctgacggttacgctgcccaggttcttccagccatcgaggccgtccatcacctcgtgcacgtgcagggcatagtcctcgatgtcggtggcgatacgccagacgccgtctgtgaccagcgcgcgatgaatgtcgccggccatggccttctgcacgatgcggcgcttgtggtgcttcttcttgggccaagggtcggggaagaaggtccatacctcggccacggtgccggccgcggtcaccttgaacagctcgggcgcattgacctgggccacgcgaatgttggtcagcccctgcttgccggcgagcagcagcgtgtgggccacgccggggtcatagacctctagagcaaggaagttcgtctccgggtgggctgcggctgctgccaccacgttttctccctgcccggtgccgatttccacaatgagcggattatcgttgccccatgcggactccacgaacgcgcggtcgagcgtgacgccttcgcgcacgtccagcaggttgccggccgcaatatccaacagatatgtgccggcatagttgtcccatgcgcgctgcaggcgatcgtccaaacgtccggagcggcgtacgaaggagagcaccttgtgcagggggtgcgccggtgcctcggtgtggtctgtgcccatcgcggcgacgggatcgattgctgtggattcgggattggtcatatattcctcggattttccttgtgcgccgcaccgctgttcattcattaggtcgatttggcgttcattaggtaggtggtgtgcgataccaaccaccatatcaagccgtttacccggtgtccgtgcgggccggctccgggccgacctacctaatgaacgccaaatcgacctaatgaatgcagatattgccggacgacaccaccgttttgtgcgattatgttcgtgtgatatactcaaattgtttcaaaaggtaacaaagcggaccaaaagtgaacagccgctgaactccccacggccgacacttgcaacccgcacaaggaaaggtcaactatgacagttctcgtcaccggcggctgcggctacatcggcgctcatgtcgttcacgcactccatcaggccggcgaaaaggtcgttgtcgtcgacgatctgagctacggcaagcccactcgcatcgaaggctcccgcctgtacggcatggatatcgccaccccgggcgccggtgagcgtttggccgaaatcctcgatgccgaaggcgtcgactccgtgatccactttgccgctcgcaagcaggtcggcgaatccgtggagaagccgctgtggtactaccagcagaacatcaacggcatgctcaacgtgctcaccggcatgacccagtccaagaacgccaagaagctcgtcttctcctcttccgccgccacctatggtgtgccgccggtcgatgtggtgcctgaggacgtcgtcccgatgctgccgatcaacccctacggccagaccaagctgttcggcgagtggatggcacgcgcctgcgagcagccgttcggcatccgcttctgcgcgctgcgctacttcaacgtggccggctgcggtccggtggagcttgaggatccggccatcctgaacctcatcccgatgctgttcaatcgcctcaagcagggcaaggctcccgccatcttcggcgacgactacccgactccggacggcacctgcgtgcgcgactacatccacgtctccgacttggccgacgcccacatcgccgccctcaagtacctcgaccgtgacaagcgcaagtacgacgccttcaacgtcggcaccggcgaaggcacctccgtgcgccagatcgtcgacgaagtcaagaaggtcaccggtctgccgttcaccgaggctgtcatggcccgccgcgccggcgacccgccgcacctgatcggctccccgaagcgcatcaacgaggagatgggctggcatgccaagtacgacgtggaagacatcgtcaagtccgcgtgggatgcctggcaggccaaccccgaacaccacatcgacgtcgacacctggaagcaggctgactgagattgacggtcactttgcggtggatgccgcgaagcgtttccgtccataagggcgtggccggggttccggtcgcgcccttcgtcgttttgtggatgtttgtgacagacgtgttcgcgtgctggtgatagcaaaaaccttgaaattatgcggaacacgccgaagtttgcatgactggcgaatttcagtaatatatacatctgttgcctcacgcaagtgagaacaatggccccgtagctcagttggttagagcgccgccctgtcacggcggaggtcaccggttcaagtccggccggggtcgctggaatggttatgaagcccggattatccgggtttttgactgttcatggctctgtagctcagttggtagagcgagcgactgaaaatcgctaggtcaacggatcgacgccgttcggagccaccacaatgaagccccgccttgtgcggggcttttgcatatccgtcacgtatctactccggcgggctggccggtcaatgcaaaggctcgcgttcgccaacaactgtcttcctcgccgcaactatgcacgccaacagcaccaatgcgaacatcgggttagggttaaataaagaaacgtgggtcttatccgcgcgtgtcatggtcggtgcgatcgtccgccccagccgtttctggggctgtggcgctcatagagtcagtattgcagaaaaagcacctgcgaaatgcgcgtgcgaagggaatcgtgtgggacggcacgtgattttgccgattttcgacgtgccgtcccacagcgttcgaagaacgccctcagagctgagggcaaagaacggctctattctgcggttctcggcttatgtcatgcgggatagcagatacgtcaaacgattgatgtatctgctatcccacacttctgtgggacggcagatgaacaatggtaaaaaccgcgtgccgtcccacaaaaaggaatcaggcctgccaccattggcgcagggggtaccacttgccgtccgggtgggccacgcgatccggcttgacggccaagaactggtgaatctggatgccgtcgagctcgaagttcagagcgcaggcggccatgtacataccccataccttggcgcgttcaaagccgacctgcttgaccgcgtcgtcccaatgctcggagaggttctggttccagtgatgcagggtgagcgcgtagtgctggcgtaggttctcctgatgcaccacgttgaagccggcgtcatggatgcacgattcgatgaagccgggcgcgccgagatcaccgtccgggaagatgtaacggtcgaggaattcgtcggtaccgggcttgccgtgaggcttgtcatggctgatggtgatctggtggttcagcagtcggcccatcggcttcagaaggcggaacatctcttcgaagtagctctggtagttcttgacgcctacgtgctccatcatgccgatcgagcagataccgtcgaagtcgtgctcaggcacctcgcggtagtcctgcacacgcacttcggccagatcctgcagcccttcacgggcgatccattcgttggcgtacgcggcctgttccttggaaagggtgacgccgagcgccttgatgccgcgacgggcggcggtgatgaccatcgaaccccagccgcagccgatgtccagtaagcgctggccgggctgcaagtccagtttgtcgagaatcaggcgcagtttgttggcctgtgcgtcttcaaggctcatgtgttcgttgtcgaataccgcgcaagtgtaggtcatggaggatccaaggaagtcggcgtagaactcgttggacatgtcgtagtggaagctgacggtttccgaatcggccttttcggtgtgcggcatcaggccacgcttgatacgggcgaacttgctcgggccctcggtggcgggcaccggcggcttcttgaagccatggctcaggatgccggcagatacgcgggcaattgatgtgggagtgagtgggcgaacgtatttggacagcgacaccagcttgcgcatcgccggatacgggtcggcgtagtcaatgccgtccacgtcgaaatcgcccagaatgtatgagcgcacgatgccgatttcattcgggtgcgcgagtagctggtacatgcagttcggcgtggcgattttgaccttcaaatccgcgtctgccgggccgaaatgcgagccgtcgaaagcgtcgatacgaacgggagtggcggggtcgagaaacagggacgccatctcgccgaccgtcatagccttgccatttgccattatctacctcattctcttatgatgatcaccccaactgtcgaggtatcttagtcctcttcaggagactgaaaccgttgaatacaccatctggtgaaccagttcgcgttcggctgatgaagcacgaatggaattaggcatctcgcatattgattgcgctacgcgcgaagtaagcggatgagagacgagtttctcggagagcgtcagatgactccggaaaatggtcttatcgttgagatttcgggcgatggaactggtttggtcaatggacaataattcgacaagtgcggaattccgccatttcttgccattattttcagtgttgttctttcagcgtgttttcaggtgaatgctcatgcgcggagtagactggggaaccgttggaccactcaaagacagagtggaccaccagttaagacactagctcaaaaggagagcccctatggtgtaccgcatgattttcaaccagactgcatacttcggacgtggcgcgatcaaggagattccggccgtcgccaagcagcacggcttcaccaaggcatttatcgtcaccgacccggtgctgctggagaccggcaccgccgagaaggtcaccaaggttctggatgaggccggcctgccgtacgaggtgttctccaacgtcaagccgaacccgccggtcgagtgcatcaaggacggcgtcgccaagttcgccgagtccggtgcggacttcctgatcggcctgggcggtggctccccgcaagacacctgcaagggcatcggcatcatcaccgccaacccggagttcgccgacgtgctttctctggaaggcgtcgcggataccaagaacccgtccgtcccgatcttcggcgtgccgaccaccgccggcaccgcctcggagacgaccatcaactacgtggtcaccgacacggccaacaagcgcaagttcgtggctgtcgacccgcacgacatcccgatcgtcgctttcgtggacccggatctgaccgactcgatgccgcgcggcctgaaggtcgccaccggacttgacgccctgacccacgccatcgagggttacattaccccgggtgcctggagcctgtccgactgcctgtccatgcagaccatccgcatgattgccaagaacctggccaagtccgccgacggcgacattccggccggcgagcagatggcctacgcgtcctacatcaccggtatggcctactccaacgtgggcctcggtctggtgcacggcatggctcacccgctgggcggccgtctgggcgtggcccacggtgtggccaacggtattctgctggccccggtcatggaatacaacaaggacttcaccggtgagaagtaccgcgacatcgccgatgcgttcggtgttgaggacgcctacaccggcgacctggagaaggtgcgcgaagaggccgtgcaggccgtccacaagctgaccgtggatctgaagaacccgaccacgatttccgaagtgggcgccaccgaggccgaccttgagccgctggctcacgatgccttcaacgacgtgtgcacccccggcaacccgcgtcaggcaaccgaagaggacatcctcgcgatttacaagtcgctgatgtgatcagtcaatgacagtaaacattagctccctctgatgagggagctgtcagcgtagctgactgagggagagaagttgcggcgtagccgctgaataataggtatcggcctgcgtccgattcaatgttttagcgactgcgtcgcagtctcttcctcagtctcacttcattcgacagctcccttatcagagggagcttgcataagcagagggggctcgtatatctagctacttttcgtgcttttcgtcgtagacttcgtcggtgggggtctcgtcgtacagctgcttgccttgcgcctccgccagttccatctgctcgttgatccacgcggcttcagccggattgatatccgcggaattcagcactttctgccacaccgggtagaacatatgcatcgccggatacatggcggtgaacaacacctccggcttatgcgtgcgcgtatgttgcggatgcgcatcaaacgtattcttaaaacgtcgcatgtagctcaggaacgaactcaacgacgtatccatccgtcgcgcactcatcgcggcgatcatgcgcggcgagtacacggttttcagatccttgcccatcagatgcagggaaatatcgatatcctcatgcatcacatcggccttatcccggcagacctcattcgcaatctgatgccaggccgaagcgcgcaaggccatattcgagccgaacagcagcggctggccgccatcggcgcggtagattcgcttgcgtaaggaattgtcgcccttcaacccgaaatgacgtgagggcatgtcgtaatacatcaccggaccagtggcacccatcgcggccgggtcttcggtgaagatgccggagaccacctccacccagtcaggccggatcatacagtcggcgtcaaaacggcccagcacatcgccggtcgcggcgttcaggccaaagttgcgggtgggaatcagcccctgttcatcgttctggtgcaacagtttgaccggggcctcgggatgttcggcgatgaactgttcgacaatcgcgcaggtgttgtccgtagaacgattgtccaccaccagcacctcatgcggcatgatggtctggcgagtggcgttcagcagacagtcgcggatgcgttcggcttcgttccacgctgggatgatgatcgaaacgttgagcataacatcaacaatagaaaagcgggtgtacgccgccggcgtatccgagcttcaaacccctcgctacaatggggagccatgagcgaacgcgtgcgaaacgtaaacagcaccgacacgtcgagaagcggtgccgcagaagccggggcagacccgggcgacgagaatcgtatcgactttggtactttgttccccgccaagggagattcccgcaggccaccggaatggttcggccgcgcgctgctgtatgtggccctcgccgtcatcgtattcatgttctgctggcgctcgtggggcgacatctcctatctggtgttcgacatcatcatctcgctgttcctggcgctggccgtcgaaccgctggtggtggcgctggtggctcatggctggaagcgtggcgtggcttccgccgtcagtctggtgggcgtggccgtggtcgtgggtgtgctgctcacgctgttcggcaatatgtttgtacagcagatgattgccatggtccgcggtttgccggccatgtatgggcagattcgtgagttcgcggaccagtacaccacgttcaagatgccggagatcagcaatctcggcatggaaatcttcaacaatatccagacctcgtgggtcaccgatttcgccggcaccgccatgagtacggtgggtggcctgttctccttcctgctgaacctcatgaccgtggtaatgaccacgtattacatctccgccgccggcccaaagctgcgccgctccttctgccagtggctggcccccaacacgcagcgccgattcctgctggtgtggaccgtggcccaaggccagatttcgtccttcctgttctcccgttcgattctggcgttgatcaacgccacctgcactgccatcttcttagagattctgcatgtgccctactggctgccgttggccctgttctgcggcgtggtatcccagttcatccccacggtcggcacctatatcggcggcgcgctgccggtgctgttcgcttggggcaaccgcggatggacgtacgccgtggcggtgctggtgttcatcatcgtctaccagcagatcgagaacctgattctctcgccgaggatttcgcagcgcacgatggatatcaacgcggccgtcgccttcctcgcggtgctggcgttcggctcgctgttcggcgcgtttggcgcgttcctggcgctgccggtcaccgcatcgctgcaggccatcttccgtgcgtacaccaagcgctatgagctgattgactcaccactgatgaacgatccgactccggagaagaagtccaagatcgtcgaggcgtccgaagcgttcggcgagcatgtgctgcagccgatcggcgagcacatgccgcgtgcggccaaggggtccaccagccgtgtgccgatgaatgaggaactgcgtttgctgcaggaacagatctatgcgattccgccacacgagacgaaagaatccgatttggacgattccgccaccgtggcgattccgcagcgtggtgccgcggatacgcagcagtctgagcagcccaagcaacgcaagcaaaccaagcagtctgatcaatctgcctccagcaatcctagggcggggtggcgctgatgaccctgctttccgtactcgatattcttctggtaatcgtcggcggtgccggcatgatatatcagggactgtgcatcgtgatgtccctgttcgccaagcccgtgcgcttccccgacgccccgatgaccaaccggtatgccgtgctgatctccgcgcgcaacgaagaaaaagtgatcggcaaccttattgggtcgattcgcgatcagacctacccgtccaacctcatcgacatctggctggtggccgacaactgcaccgacaacaccgccgacgtggtgcggtctttgggctgccatgtggtggaacgccacaatcttgagctggttggcaagggatatgcgctgacgtatctgttggggcatatgctcgacatcggtgtggccgatgattatgaggcctacttcgtgttcgatgccgataacaagctggacaagcactacttcgaggaaatgaacaaggcgttctgctccggattcaagattctgaccagctaccgtaattcggtgaatctggcggataactgggtgtcttctggttctgcgctgtggttcatccgtgaatcgcgattcctgtctaactcgcgtatgattctcggttcctcttgccatgtgggcggtacgggattcatgttctcccgcgaggtgatgaagcggaacaagggatggaagttccatctgctcactgaagatcttgaattcactatggattcgattctgcatggcgaccgcatcggctattgcggtactgcgatcctctacgacgagcagccggttaccttctcgcaaagttggcgtcagcgtttgcgttggagcaagggattcctgcaggtattccgttattatggctcggcattgctgaaacgcgcggttcgcgaacgtgatttctcctgcatcgacttcacattgatgctgtgtccgtttaccgtgttgggcgcgattcgcgcggtgatgggcttgctgttcgccgcgtgtggcttcgtgagttggccgagccagctgcaatcgctggccggttggtccagcggcatcatcatatcggtgttgggcctgatggcattggctgcattgaccatcattgtcgagcgcgaccagatcggtgccacgaacaaggagctgctcgcctatgtgctcagcttcccgatttacatgctcagctacgtgccgatctccttccaggccatcttcgccaaagcccagtggaagcccatcgcgcataagggttgaccgagtccgctagtccggagccgctcagcggggcaatccaacagcaacccgggggtgctgcgctgagggttgactggtggggtagagtggatgtatgagcttagacaatactcaaaggaatgtcggatttcagccgccgatgatgccagccgccgcccccgcgcctgcacagccgtcgcaaccgcagccgcaagcatggccgccgaatccgaatgcggcggtgtccattcgtggcctgttcaagcacttcgaccggaagatcgccgtcaacgggctcgcgcttgacattccaatcggctcgttctatggactggtgggccctaacggcgccggcaaaaccaccacgctcaatatggtgaccggtctattggtaccggacgccggcaccgccatgattttgggccatgacgtgtggagcgacgtgaacacggccaagcgcatgatcggcgtcatgccccagcccgaccagatcttcgaccgactgaccggtttgcaattgctcgtctactccggcatgctgcgcggcatgagccgcgatgagaccacgcgtcgcgcccaggacctgctcaatgctttcgacttggccggggccgccaacacgatggtcaccgattattcggccggcatgaccaagaagatctgcctggcctccgcgatgattcacagcccgcgcattctggtcttggatgagccgtttgaatccgtggacccggtgtccagcgccaacctcaaagacattctcatcgaatacgcgaagactggcggcacggtgatcatctcctcacacgtgatggcattggtcgaaaagatgtgtacgcatgtggccgtaatcaacgacggtctggtatgcgcggccggcacggtggacgaggtcgctgctggcgaagaactcgaagaccgcttcctgcaactagtcggtggccgccacgaagccgcccatctcgcgtggctcgatggcgggcaggcccaagcccaagcaccaacttcggcccagacgattcagccgattctgcctacgcccgccacacccaccgatgaggcccgccaatgatcaagaccgccatcaccctggtccgcctgcgctggacgctcacgctcgccaccctgcgaaaatcggcgtggcagaccgtcgcctatgtcttttccgctgtactcgcggccggcaccatcatcggcaccggcgtgctcgcatggttcatcggcatactgccgcccttcaccgtgaacgcggatggctttccgctgaacatccttggttccggaggcatcgtcaacatagtcgtcgtgctggtcggcgcgaccatgaccatcttcatcggcttcatccagctcatgatgcttggcgaaggctccaccatgaacccacgcaaattcgcgctctacggcatcgccgaccgcaacctgcaattcggcttgctgctttccggcctgtccggcatccccgcccttaccggcgtggcctcactgatgctctggacactggcctatcggcatatgggaccagccgtaatcatcagttccctcctcgccgcagtgctggccgtcatcaccatgatgagcatctccaaactgctcatcgccctatccaccacgctggtgaccagcaaacgcggcaaaggcgcgttctatatcttcatcgtgctgacgttcgttatcatctgtcagttgccgaacattctggtcaactccggcgtggccttcagcctcaacaccgaaacctggggcgcggcgaccaccatcgtcgcatggacgccgttcggcgcggccttccaactaccgttcgacgcgcttaccggagcctgggcggtgctgctcgcccgcatcgccatccttgccgtcacatggattgtctgcttcgccgtctgcacctggtgtctgagacatgaacggctcaccatcggcgcaaacagtccgtccgagaccgccaaaggcatcggcgcattcgcatggatgcccgattcggcatccggcgcggtttccgcacgcctgatcacctatctcaaacgagacccccgtcaagccatgaccttcgccatgccggtcctgttcctgatcatcttcgccttccaggcacacggcatcagcgcggtcgtctggcagtcgctgatctggtgcggctggttcatgtcagtggtggaaagcaacgggctcgcatatgacggccgcggcttcaccatggaagtcatcgccggcgtgcgtggccggaccgacagaatcggccgcgtacgcgtctacgtcggcatcatggtcgtctacatggtgctgctccatctcgccggcatcgtgctggtcggcgcactgaccggacgctgggcgcagcccgatgacctcgctaccggcctgatcttcctcgccacgggcatgggcatcgccttgagcggactgggcgtggccgaagtcacctcctgtgtgctgatgtacccggtcgcctcaatggacaagccgttctccgcgcctcaaggccgcgccatggcccaaggcttcttcccgttcgtctacatgcttggcagcctgctgctcatgctgcccactggcatcgtggcgctggtcatgctgctgacgggagccgaaggcggcatgtggctggcgattattccggtcgcgctggccaatggcatcggcattctggcactcgggacatggctgggcggtaagctgatggatgcgcgaatgctttcgattgtggcaacactcgactcgttcgcctcattgcagaaatgattgccttggcataaggagcacgatggtatctacagcggtatcacgccgtcagcgacgtgaagcgcaacggcggacccaacgatcgcatcgccgaacactgaccgtcatcatttccgcactgaccaccatcgccctgttcgcggggtactgcgccgccgacatcaccgacgtggcccccggattgttgacgttaaaacctgtcaccgcacctgtttttgccgatccggccaccgccaaatcaggcggcaccgtcgccggcaccttgaacgcgaacaaggccattgattccacggccgcttctgcgctggtcaacgaattgctgtccgcgcaaggcgtgggaaacgatgcgtcggtgatcattgaagacgcccaaggcaccgtcgctgccgaacatgagtcgaacactccacgcgagcctgcatccacactgaaaacgctgaccgcgctcgccgcctcatccaccctgaacatggcatccaccttggatacccaagtgttcctgacccaatccgatgacggcaccaatacgttgaccctcaaaggcaatggcgacatgctgctgtctgcaggcgattccgacgcacaccataccaacggacgtgccggtctgaacaccttggccaaggccaccgtggccgcgctcgcccagcgaggcatcacttccgtcaatctcgagtacgacgacaccctattcgacgactcacgcattccggcaggtctgtcggaaggcggcgcggtcttaagcgactacaccgtctacttcacgccggtctcatcaatggcgattgatggaggccgccaatacaccgccgatacgcctgcgccggccgaccctgatgattcggccggatacccggaactgtcccagcacaccgccagcgacgtggccacgaaattcgccgaactgctccaatcgaacggtgtggccgttaccggagacgtgacggcaaacaccgctccatccggtgaaacgcctttggcttcggtgagttcggcaacactgtccgaaatcatggcatacacgttgcggcattcggacaatacgctggccgaggagttcggtagactcaccgccttggcgaaatcagcgacaaacagtcctgaaggcggcacggaagcggtcaaatccactctgaacgatctcggtctcgacacatccggtctgaccatggccgattgctccggcctgtctcccggctcccggctcaccgtacgcacgctggcggccgtccaacaacgtaatctgaccaccgagagcggtgctgctggtgcggaaggtctatccatcgcggggttggtgggcacggcgcaggatcggtatacggatgatgccgtggccggtctgctgcgcgtcaaaaccggcagcctcggcacggtcacgtcgatggccggcaatgtgtcccgtaccaatgggggagcgttgtcgtttgccgtggtggtcaacaatcctgaggattatgccgccgcgcgtagcgccatcgactcgttcatcaccaagctcgcggggctgtaaaagaggcatcaagggccatcaagggctacaaaggccgtaaacgtccataaacgcacgagtgcctataaccagaaaagggtggtgagtacatggcatattccgcacgattgcgcaaggccgtaggcgcggtccgcgcaacgctgagcgccgtggaactatgcgatgtgcaggctcccgaattcgcgcagcatggggaccatgccgttgccgccgatgcgccgctcgtgctcgtggcctgttcaggcgggcgcgattcgatggcactggctgcggtgagccatatcgtatgcacgtccatgggcgtgcgttgcggtgccgtgattgtggatcacggcttgcaggcaggctccgaacgggtcgccagcgaggccgcggatcgttgccgcgcgttgggactgggcccggtcatcatgcgcaacgcaaccgtacaggcgcgcggcgagggcctcgaagcggccgcacggcaggcccggtatgacgagctgtgcgccgcggcgcatgaatcgggtgccattgccgtgctgttggcccacactatggacgatcaggcggaaaccgtattgattggcctgctgcgcagtcgaggcgtggatgcgttggctggcatgccgcaggtcttcacacgcagtggcgcgacttttgcgcggccactgcttacccttactcgagccgaaaccaccggtatctgtgaagacttaggtgtggaatattgggatgaccccaccaatggcgatgcggtagacggcgagttgccgaacgactatccgttgcgctcgcgggtgcgtcacgacctgctgccggccatcgaacgattcgctggattcaatgtcacccgccatttcgccgaaagcgcacggttggccagaatggataaggagtatctggatcagcgatccgacgaggtgatgggggaggcggttgcggcagttgaccggccggcatcgtcggcagcggtatcgaccgatgcgccacgagcctgtgtggcaggcgataccaacgattcgggccatggcatcggcctgatgatcggcgtcaaacgtattgcacgtgagccagaggcgattcggttgcgggtcatcgctcacgcgctgagccaggccggtgtgaacgccagtgccgcccagattgccgccatcgaccggctggtcgtcgattggcatgggcaaggcggcgtctcacttcccagaggttattcagccaatcgcaagaaacacgtcattcgcgtgtgccaagatggagcgcatgcgaatcgctgacgttgaggaagatattgaccacgagctggtcagcaaagaacagattgatgccaagatccacgagatggctgctctcgcgagcgaggattaccgcgataagaatccgctgctcgttgcggtgctgaaaggggccgtgaatacgctggtcgcgttcaccgaggccatgagcattcctgtacagatcgatttcatgagcctgtcgagctatggctcgggcacagtgtcgagcggtgaggtcacagtcaggcaggatttgtccgccgatgttcgcggacggcacattttgattgtggaggatattgttgattcaggacgcacgctcgcgtggctggtcgcagaactgaaacgtcgtggtgccgcttccgtggaggtcttcgctttgctgagcaagccttcccgccgagaggtggacgttgatgtgaagtacgccggctatgagattccggacgagttcgtcgtcggcttcggcctcgactttgacgaacgctaccgcaacctcgattcgatcgcggtcctcaagccgtccgtctaccaaggagtgcaagcatgagcttcccgcaagggccgggtaacggcaataacccgaacccggacaacaaccgtaacaacggcaacccgttcaccaacccgttcaaccgtggcaataacgggaacaatggcaaaggcaacaaagagaaccgcccgatatggcagtccccctggctgtggggtgccgtgctcgtggtcatggtcgtgctgatgttccagatgttcgccggcggtggcaccaaaaccatcgatactaaagatggtttcgcgctgatcaatcagggcaaggccacctacgccgagatcacggacaacaagcaggtcgtccgccttgagctgaagaatgactacaccaagaagaacgccgacaccggcaaggtgaccaactacggcaagaacgtgcagttctactacaccttcgcccagggcgcacaggtggccaaggccgtggagaacggcgatctcgaaaagggctggacctcgaatatcgagcagaccagtgtgatgagctacctcatcacctcgattctgccgttcgtcatcatccttgccttgttctggtggctgatgagccgcatgggcggtgccggcggcatgctcggcatgggcggcaagaaaaacagcggcaagctgctcgacggccagacccccaccaccaagttcgccgatgtggccggcgaagacgaggccgtggccgaagtcgaggagatcaaggacttcctcaaggatccgtccaagtacaaggcgctgggcgctcgtattccgcgtggcgtgctgctgtacggtcctcccggcaccggtaagacgttgctggcccgagccatcgcaggcgaggccggcgtgccgttctactcgatggccggctccgacttcgtcgaaatgttcgtgggtctcggtgcctcccgtgtgcgtgacctgttcgatgaggccaagaagaacgcccccgccatcatcttcatcgatgaaatcgatgctgtgggccgcaagcgtggctccggcatgggcggtggccacgacgagcgcgagcagacgctgaaccagctgctcgtcgagatggatggtttcgacaacgacaccaacctcatcatcatcgccgccaccaaccgccctgacgtgcttgaccccgctctgctgcgtccgggtcgattcgaccgtcaggtgggcgtggccgcccctgatctggaaggccgtgaggcaattctgagggtgcatgccaagggcaagccgttcgtaccggacgtcgacctgcacatggtcgccgtgcgcacgccgggcttcaccggtgccgatctggccaacgtgctcaacgaagccgcgttgctgtgcgcccgtgccggtgcccagttgatcgacaaccgcgccatcgacgaggccatcgaccgcgttcaggccggaccgaagcgcaagtccaagggcatggctctggaagagctgcgcaacaccgcataccacgagggtggtcatgcgctggtggccgccgccctgaacaacaccgatccggtgaccaaggtgacgattctgccgcgaggccgcgccctcggctacaccgccgtcatgccgacctccgaccgctactcgcagtcgcgcaaccagctgctcgaccagatggcctacgcgatgggcggtcgcaccgccgaggaaatcgtcttccacgacccgaccaccggtgcctcgaacgatatcgagaaggctacgagcatcgcccgtacgatggtgatcgaatacggcttctccgacaagctcggcgccatcaagtggggttccgacgacgatcagaccaccgtgatggacggtctgcagccgcgcaaatactccgaccgcaccgccgaagtgattgacgacgaggtgctgaagctggtggaaaccgcccacaccgaggcgtggaccatcatcaacgacaaccgcgatatcctcgacgagttggtccgtcagctgctggtcaaggagaccctgaacgagaaggaacttgcggagatcttcgcgccgatcaagaaggctccggttcgtccggtgtggctgtccaacgaccgccgccccgactcggacaagccgccggtggagattcccgaaagcctcaagcgctcggtcggcatgaagccggaagagtagacacgatgacgattcggcccgacctgttcatgtggtttctcacgtacgcaggccgggccgacgtcgttgtggacaatgacaagggagagatgagatgaacgaatatatagagtcttgccatcgggagaaacacacatacgacgaggaaggcgtgcgcgaggccgtacgtctgttcctgaagtcgattggcgaggatcccgagcgcgaggggctggtggaaacacctgaccgtatcgcccgcgcgtgccgcgagctgttcaccggtctgcaggcctcgccggccgatgcgctggagaagcacttcgacgtggataccgacgagctggtgctggtcaaggacatcgaactgtattcggtgtgcgagcatcatctgctgcctttccatggcgtggcccatgtgggctacattcccgccaaggatggggtgatggggctgagcaagctcgcccgactggttgaggtgtatgctcgccggccgcaggtgcaggagcgtttgacccagcagatcgccgacgcgctggtcgagtatgcgggcgcacgtggtgtgattgtggtgaccgaatgcgagcacctgtgcatgtcgatgcgcggcatcaagaagtcttccgcccgcacggtgacctctgcggtgcgcggcatgctgcgcaatccggccacccgagccgaagccatgagcctcattttggataaatagtgtctactaagctccctcatcatagggaactcacttgggacctacatagaaggggaaacataatgactgatttgcaggcgttgcatgacactacgcacaccatggtgatgggtgtgctcaacatcaccgaggactcgttctcggacggcggcctgtggttggacccggccaaggcggcacagcacgggcgcgacatgatggccgccggcgcggccatcatcgacatcggagccgaatccacgcgccccggcgccaagcgcgttgccgaggccgacgagctggcccgcatcaccggtgccgtcaagacattgattccggccggtgccgtactgtccatcgacaccacgcgcgcatccgtggccgccgctgcgctgagcgagggcgcccagatcatcaacgacgtttccggtggcacgctggatgccgaactgccgcatgtggtcgccgaccacgactgcctgtacatcgtgcagcattggcgcggttggctcgccggctccaagggcgcgaaccccgatcaagacacctccgtctacgagcacggtgtattgaccgacgtacacgacgaactcatgcgccaagtcgacggtgtgctggccgccggcgtaaagcctgagcgcattatcatcgacccgggcctgggcttctccaagcccggcatcgagcacaacctgccgctgctgaccgggctcgagaccttccgcgccactggatatccggtgctgattggccagtcccgcaagcgcttcatttcggcgatgcttaccggggcgggtactgccggtgctgatggcccgaccatggcccagcgcgatgacgtgaccgcagccttgtccgccctgtccgccgagcacggcgcatgggccgtgcgcgtacacgatgtggccaaaagccgcgccgccgtcatcgccggcaacacctggcgcgaatacgcatgattcccctggctccctgtttttggttgcttctaggtcttggctcccctcgggcgaggggagctggcgccgaaggcgactgagggggagcatttgaacagaaagccttaccaatggacaccatcacacttaccggcgtacatgccaacggcacccacggtgtgctcgcctttgaacacgaacggccacaaaccttcgtcgtggacgtcaccctgcaccttgatctggccgccgccggccaatccgacgatctcaatgacaccatcgattacggccgcgtggccaaggatatcgtggctgtcatcgaaggccctcatgtggacctgatcgagcgtctggcccaacgtatcgcggataagattcttgccgatgcgccggccgtcgcctccatcgacgtcaccgtgcacaagcctcacgcgcccatcgtcgtggcttttgcagatgtatcggtctccatctcgcgcgtgcgtgccaccgataatggacgcactgctgaaaagcatgccatccataacgcggtggtggccttggggggcaatgtgggcgaggtggaatccaccttgcgagccgccgttcgggagattgacgcgctgcttggcacacaggtgaccggtatttcgccgctttaccgcacggccgcgtggggcatggctgacggtacgccggatttcctgaacgccgtggtggagcttggaaccacaatgggccgccacgaattgctcgccgcgttgcaaaacatcgaagcgaaccatgggcgaattcgtgagaatcattgggattccaggccgttggacttggacattatcgactttgatggcatcaccagcgcggatccggatctggcattgccccatccgcgtgcttggcagcgcgcatttgtgctggctccttggttggcattgaatccgaacgccaaactcgccggagcccatgaggggcctgtagccgatttgctggccgccgcaccggaccgtaacgccgtgcagctcgagagcgaagactggatgctcggcgggcatgcagtcaagcaaaaatcagcgtcggagtcggcacccgtctcacgcaaggcgattatttcgctggattccacctcgcaggatgccgaacggctgttccgcgaaaccatcgtttccatcgacagtgttcctggcaatcaggtacagggcatctcgccgctctaccatgtcagccatttcgacagtccggacgcgatgagcgcggtcatccaaatcgaaaccaagttgccgcccgccgacctgattgccgtattgggcagcatcgaaagtgttcatgatctggcagtcgaccttgaccttgttgacatggaaggcgtgacttccgacgagcccaactgcagcattccttggccgtcggcccgtaaccatgcgtcggtattggcaccttggctggatatggacccgaatgcttctctgggcggcgacccggtggccttccttttggccatggcaccggatgctggacaggtcggattgctatcggacaactggatactgtcgaatagttgagctgatggcggaaccagttacgaacggtaggctagaaaccagacggtgacggaccagtctccggcctcgagcagccgggcacggcaatgacgaaaaaacaaatcaagatgaacagcccaggcgcgagggccgttcgcaaacagcaaacagcaacgcaacgataaggaggccggacatgaaaacacggcgaacaccatggtggcagtatgtgatcggtgccgtgttgggcctgttggcgggtatcggtctggcctcctacggcgaaagctcgggactgtcgctgattggtgcgccttggattgtgcccggattgctggccgtgctgggcgttattgtgctgatcttggccctgcaagtgcataaatacgcgaataccgaccccaagaaacgtccgcatagcttcatcaatcccactatcgcggtgtatacgctggtgttggcaaaggcactgggattggcgggcgcaacgctcgccggctggtatggcggtcagattgtggtgagcttgagccatatcgaggcggatttctatgcacacgccgtcaccgagtgcgcaattgcggccgtggtgtgcatcgccgacatgatcatcggcattatcggcgaatggttgtgccagctaccgccgaacgaaggccccgaaaacctgaaaatcagggaagccaagcgccgtagcgacatagcccaggcctacaagcgataatccgtgataagccccctctggcgagggggccgtaggcatagccgactgggggagagaagaaaaaaccacaccatcggccaagccgattcccactactcctacggcacgcgcaccatagcttcctgagcgatggccgccaccaagtcgccattctgcgcatacactttggcgatgccgagtccgcgtccgtgcgcggcgataggcgtatcctgcacatataaatgccattcgttgatatcgatatcctgataccaccacatcgaatggtcgatggacgcataggaaatgcccggtgtggaaatcgacagtccggcgcggcgcagcaccggctccatcatcacctgatcgcagccgagtgccagcatcgcacgatgcatgacctgcggcacatcgacgtggccatcggccttcatccacaccatctgcttgccggaatcatgctcggcggaatccttgtccgcgcgcagcatcacggtcggcgtcacgtggcggatatcgaacggcgatttctcggcatagtaattggcgaacggcgacttttcggcgaacggctgcatgagttctttggcggaagtcaacgtttcgggatcgggcaggttttccggcatcggatcggcaaattccacaccctcttggccggtctcctggaaggaggcgatggccgtgagaatcgacccctcggcttgggtgacattgatccggcgggcggagaacgagcggccgtcgcgaaggttctcgacgtcaaacaacaggtcttgacgaatatcgccggcggcaatgaaatagccatgtaccgaatgcggcaggcgtgaagggcccactgttttggacgcggcgatcaccgactgggcgatgacctggccaccgtagacgcggccggtggggaagtacatactctcgccattgatatatgtgtgattgcggtaagcggaaggctcgcccaacttcagcaccttcaccagatggtccaatggagttacggtggttgcctgagccatggcgttcctcgattcttgttctgctgtgttcagtattcggttatcgtattccaacctatggttggcagtctatccggtgggggttaagagttccgggagcgaaatgtaacgagactgtttggaaggtaaacggtgggttatgcggtgcgttgccgctacgttgctgctgcgctgccggtgtgttgccgtaggcgactgtgggattttatgggatgcggggcgggcagccatggggcaattatggggaaagccgcccctgagggacggctttcgacgtataaagcgcgttgtggcactaatgccggcgtatctcagccgcgcacaagcttcttgtgcaggcggtgcgggcgggccgcatcctcgccgaggcgtgtcaccttgttctcctggtaggcctggaagttgccttcgaaccagtaccacttggccgggttgtcgtcgtcgccttcccacgcgaggatatgcgtggcgacacggtcgaggaaccaacggtcgtgggagatcaccacagcgcagccagggaattcgagcagcgcgttttcgagggattccagggtctcgacgtccagatcgttggtgggctcgtcgagcagcagcaggttgccgccctgcttcagggtcagggccaggttcagacggttgcgctcaccaccggacagcacgccggtcagcttctgctgatcggcgcccttgaagccgaagctggccacataggcgcgggtcggcacttccacaccggccacctcgatgaagtcgaggccgtcggacacggcttcccacaggttcttgttcggatccaggccctcacggttctggtccacgtagctgattttgacggtgtcgccgatctttagctcgccgctggtcagcggctccaggcccacgatggtcttgaacagcgtggacttacccacgccgttcgggccgattacgccgacgatgccgttgcgcggcagcgtgaaggacaggtcgtcgatgagcacacgctcgccgaaggccttatggatatggttggcttccagcacggtggaacccaggcgcgggccggccggaatctgaatctcggagaagtcgagcttcttgttgttgcgtgcctcgttttccatctggtcgtaacgctccagacgggccttgttcttggcctgacgggccttgggggaggagcgcacccagtcgagctcgttcttcagtcgcttggcgagcttggcgtccttggctccctggatctccagacgcttggccttggtctccaagtaggtggagtagttgcccttgtacgggtacaggtggccgcggtcgacctcgcagatccattcggccacgttgtccatgaagtaacgatcgtgggtgacggcgatgactgcgcccttgtactggtgcaggaactgttccagccacaggatggactcggcgtccaggtggttggtgggctcgtcgagcagcagcaggtccggggcctcaagcagcagcttgcacagggccacacggcggcgctcgccaccggagcacacgttgaccggggtgtccgggtccgggcactgcagggcgtccattgcctgctcgagctgggagtcgaggtcccagccgtcggcggcgtcgatctcggtctgcagcttgcccatctcttccatcagggcgtcgaagtcggcgtccggattggccatctcctcaccgatttcattgaatcgggcgaccttctcggcaatcgggccgaacgccatcttgatgttctcgcccacggtcttggtgtcgtccagcggcggctcctgctgcaggatgccgaccgtgaagcccggggtcaggctggcctcgccgttgctcacggtctccaggccggccatgatcttgagcagggtggacttacccatgccgttcgggcccacgacgccgatctttgcgccgggcaggaagctcagggtcacgtcatcgagaatcacgcggtcgccgtaagacttgcgggccttgatcatctgaaatacgaattctgccatgttgtgcagttactccttaaaaaggggttgaaattccgctgtttctttagtctttagtttgtgatggatacgctgtgtgcagcgcggagcacgcccccgaatcacggatcgcggtgcgccgcgtcaggcctgtgccgccctgtccgcataacgatcgaatccacgccaaaccaccgcccaccatggtatcggaagggctggaatggcgggcgtcgctatggcttggaggggtaatggatgggcctgacattgccgtggcgcgacgcgccgggcggcgcgccgtggtccagtgatgctgtagtatatcctcttgtgcttcattgaggtacagatggccccgtagctcagttggttagagcgccgccctgtcacggcggaggtcaccggttcaagtccggccggggtcgccaccaagctcctgacaaatgtcaggagcttttttgttcttttgccgtatttcgtggtgtagggcgaaatatggggttataggccaaaatgtgtgtctggtgtttagtcgtttgatggccattcgactctggcatggaagctgtttcagtcgatgccgatgccgtatcgcatggaaataccgaaggtttcgtgctggccttggggctctgctcgacacgccgatagtctgaatgacaacgtttgctattgaatgacaacgttagcgttaacagtgcttataaatggtgaaaaacgtgtgcagggtcacattggcagaacgtgcgcgagatatgacaaatcatgaaaaatacgctatgggaggtcatggcaactcgttactattttcgctgtctcgtacgtcacacaagccttcaaggagtaagccatgaccacgctcgccattgatatcggaggaactaagatcgccgccgccgtctgcgatgaaaacgatagcatcatccagcgctggcgcgtccccacgccgatggatgccgacgccatcaaccagcacatcgccgaggtgtaccgcgaggctgtggccgccggacacaccgatatcgaggccatcggcatctccgccgccggcaacgtgagcgccgaccgcaagacgctcaccttctccgccaacatcccggcctggatcaactacgacctgtccgagcacgtcggcgcgctgatcgaccatgccgtgccggtcgttgtcgagaacgacgccaactgcgccggctggggcgaatacgtgcacggtgccggccagggcagctccaacatggtcgccctgaccgtgggcaccggcctcggcggcgccatcgtgatcaacggtcagctgtaccgcggctccttcggcatggccgccgaactcggccacctgccgatggtcccggacggcgaccactgcggctgcggcctgcgcggctgcgccgagcgctacacctcgggcacttcgctggagaacttcgccaagtccgccgtgcgccgtcgtccgcaggatgccaagcgtctcatggagctgtgtggcggcgacatctccaagctggaaggcccgatggtctcccaggccgcccaggaaggcgacgtgctcggcctgtacgcattcggcaagatcggcgaatggcttggccgcacgatggccgcagtctccgccgtgctcgatccggacctgtttgtgatcggcggcggtgtggtggccgtcggcgacattctgctggagccggcccgctacaactaccagcgtttcctggaaggcagcgcctaccgcggccatgccaagatcgtcgccgccaccgccggccaagacgccggcctcatcggtgccgccaacctggctctgcgctgacgatgccgctccggcaacggggcgttagtctaatggtgagtcatggccggtgccatggctcactgccgcgctgatagtgcggtcgatgagtttccgctgcctgaccatggaatcgaatttcgggttctcggcgatttcctcatactcgtgttcggtggtcacgccggcgatttcggcgataatctcctcataggacgtttcgacggttcgatgcacgccggtgacgtgcccctgacgtatcacgacaatgcggtcggataccgcgaacacatccggcagatcgtggcagaccatcaccacggaccggccttcggagcgcagtctcttgatatatgcgagcacttccgccgactgcatcaccgacagtgcggcggtcggttcgtccagcagaataagctgcgggtcattgagcagcgtgcgtgctatggccacggtctggcgctggccgacggataaggatgcgataggggagccgacccgaatcgccgagctcagggtcttcagcacggaacgggcacgcgagttcatcgaatcgtcatcgcgtatgccaatctgattgatctccttgccgaggaacaggttcgaggccacgtccaggttgtcgcagaactcctgcccctggaacaccgatgcgatgcccatgcggtccgcctccctgatcgagggaatggtcacctgttcgccgttgagatagatatggccgaatcccggctgcagaaatcccgcgatgaccttgatcagagtggactttcctgcgccgttatcgcccacgatggcgacgacctcctggcgttggatggacagattcaccgatttcaacgcctcgacgaagccgaacttcacacagatgtcctccagccgcagcagaggaggtgtgctcgaattcctcatggtgtgttccttcttctcactcttctcctggtaccggtcactggctgacgtcattgcgaaccgagaactcgatggcgcataatgcgccgcctagcgcgcagttgtcgttcgggtgggatgacacgagtacatcgatgggtgccacggcatcagggaacagcatgcgctgcaacgcttcattgaacggttggatgaatacgtcgccggtcatggccagcttgccgccgagcacaatgacctccggatccacactgatgcacagatcagccgtcacctgaccgatacgcacggccgtgtcggcgatgatgcgacggcaaccggggtcgccttcgttggcaaaggacaccagatcatccagcgtcatattgccgtgtgtgacgctgagcaactgcaccagcctgttttccgccacgacggtgtcaaggcagccgcggttaccgcacgaacagatggcacccagcgggtcgacctggatatggccgatttcaccggccaggccggtcacgccatgcatgatttcgccgttgatgacgatgcctgcgccaaccccgtcgttggctgagatatatacgaaattgcgtttgcctgccgccacgcccatacgggattcgccgtatgccgcgaaattcgcgtcattatcgacgtatacgggaacgttgaacgccgtgcgcaacggggccgtgatatcgacgccgtcccatccgggcagaatgccgggaatcgctatggtgtggtcgctggtggccactggtgcggacacggccacgccgatgccgaccagctcgctggcttcggcgtcgatgctgctcagggtctcattgatgagcagcatggcgcgttccagcgttgtgtccgccttgtggcccaacggcagggggagcgtgtgctcagcgatgattgacttcgagaagtcaacgatagaaagcgtaagatgacgtcgcgcgatccaaagcccgacgccgaggccctgatgccgtgcaagggtcaccagagtggctctgcgaccgttgcgaacggtgtttttggtctccagctggtcttcgtcgacaagctgatggacgagcgtggacacggtcgcagtggacagtcctgtcacctctgccagttcgacctgtgtcatggcgccgaacttgtggatgctggccagcaagttggcgcggtttgcctcgcgaagcgaggtctgcgaaccgaaaagccttgttgccataagagttcagtgtagtcgttaccggcatgaggcacagcgaggcgcagagcgtggatttttcggcgtgtcgccttgtgatgcgcgaaaaatcgccattgcgttcattggttgaacataaacgacaggaaattcgctttcttgagtttgacaacttaactcaatacggtattctatgagatgaacctgaggttattctcaggttcgggcgaccaaggagggttcgccatcccctcgaagatgaaggagaacaaatgaagttcactaagaagatcgtcgccgtggtggcaggcgttgccatgtgcgcgggcctcgcggcctgcggtggcagccgtagcggccaggcaactggcggtgatgccaagatcgaaaagggcgccactatcggcatttcgatgccgaccaagtccgaagagcgttggaacaaggacggcaacaacctgaaggccaagctggagaaggccggatacaaggtcatcctgtccttcgccgacgataagccggcccagcagaacgctgacatcgagaacatggtcaacaacgacgccaagatcgtcgtggtcgcttccaaggacggcaccgcagtgggccccgccgttgagaaggcccgcgatgcaggcgccaaggtcatcgcctacgatcgactgatcatgaacaccgacgccgtcgactactacgccaccttccagctggagcaggtcggcgtgctcgaggccacgtatctcattgaccagctcaagcttaaggatggcgccaccggcccgttcaatatcgagctgttcaccggttccccggatgacaacaacgccaagtacttcttcaagggcgcttgggatctgctgcagccgtacttcgagaagggcgtgctcgtctccccgtcccagcacggtcagggtggcgtgaccaaggacttcaccgttgaggattggcagaagatctccgtgatgagctggaagaccgagcaggcgcagaaggacatggaatccatccttgactccacctacgcccacggcgagaagctcgacgcggtcctcactccgtacgacggcatcgcccagggtgtgatcaacgccatcgaatccaagcgtcccgacatgaagccgggcaccgactcctggccgtacatcaccggtcaggacgccatggagatcgcagttgccaacatcgccaaggataagcagggccagaccgtgttcaaggacgtgaacaagctggctgacgccgtgtacgacatgatcgtcgagatcgccgagggcaaggaagtctccggcctgaacggcaagttcaacaacaacaacatcgacgtcccgtccaagctgcttgacccccagaacatcaccaaggacaacctccaggatctggtcacggccaactacatcacccaggatcgcttcgacgagctgactaagtagtcctcatcaggcaatccgtaaacaaacacaatgacatgcggcgcatagccgatatgcgccgcatgtccatgaacacagaactgtgacgaggagtgatgacatgtcatcaaatgacaccatcttgacgatggaaaacatcacgaagacgttcggtccggtcaaagccctcaccgatgtgaatctttccgtcgatcgcggcgagatccacgccatctgcggcgagaacggtgcaggcaaatcgaccctgatgaacgtgctttcgggtgtgtacccatacggtagctattccggcaaaatcacctttgatggcaaggaatgcaaataccatactattaatgattccgaggccgacggcatcgtaatcattcatcaggaactggcgttgagcccgttcctgtccattgcggagaacctcttcatcggcaacgagcaggccaagggtggcgtgatcgactgggacaagacccgcgccgaggcgaagaagctgctcgatcgtgtgggacttcccgaagacccggataccagggttatggacatcggcgtcggcaagcagcagctcgtcgaaatcgccaaggcattgtccaaggacgtgaagctgctcatcctcgatgagccgaccgctgcactgaacgatgaggattccgcccacctgcttgacctggttcgtcagctacgtgacgagcagggcgtgaccagcatcatcatcactcataaactcaacgaggtcgccgccatcgccgacaatgtcaccatcattcgagacggttcgaccgtcggtgtgatgtacgtgacgccggagacgccgctcgaccaggaagaactcatccgcaagatggtgggtcgtccgctgcacaacctgtacccgaaccacccctccaataccccgggcgaggaatacctgcgcgtcgaggattggaccgtgcatcatccgctcgacgcggagcgcgtgatcgtagaccatgcgaacatcaacgtgcacgccggcgagatcgtcggtctggcgggtctgatgggtgcgggtcgtaccgaaatggccatgtccatcttcggccactcttacggttccaacatctccggcaaggtgttcgtcaagggcaaggaagtcaagatgcccaacgtgcagtccgcgattgacgcaggtctcgcctacgccaccgaggatcgtaagggcaacggtctgaacctgctgcagaacatccgagagaacgcatccctggcctccctgaccaagatcagcaagggcggggttgtggacgacaaccttgagcgcaaggaagtcgaacagtaccgcaaggacttcaacatcaagtgtcatgacatcgatgtgaatgtctccaccctctccggtggtaaccagcagaaagtgctgctcgccaagtgggttatctcgcagccggacatcctcatcctcgatgagccgacccgaggcatcgacgtcggcgccaagtatgagatctacgaaatcatcgataagcttgccgatgcaggcaaggccgtcatcgtgatttcctccgagctgcctgagctcatcggtatctgcgaccgcatttacacggtgtcctacggtgtcgtcaccgacaatgtcgagaagaatggatttacccaggaatacctgatgaagggtatgaccaaggaaagggaggtggcagcctgatgagcgccgcaactgcaacacctgcaaagaaagaagaaaagaccggcctgctggccacggtcgccaacaatgcccgtcaatacggtattgtcggcgcactgctgatcatcgtcgtggccttcgagatcctgaccggaggtgtgctgctgaagccgaactccttcgtgtccctgatccagcagaacgcctacgtgatcatcctggccattggtatggtgatggtcatcatcgccacccacatcgacctttcggttggttccttggtggccttcatcggtggtgtgtgtgcactgctgatggaacgcgccggagtcaactggatgctcgccatcgtcatcgctctggtcgtcggcctgatcgtcggcgtctggcagggcttctgggtcgccgtcatcggcatcccgggcttcattaccactctggccggcatgttgatcttccgtggtctcgccaccgtgatcgtcggcgaatccgtgccgattacctccctcgaattccgtggcattgcccgtaactacctgcccaacatccttggctggtggggtccgttcgacggtctgaccattgtgctcggcatcctgtgcattgtcggctttgcctggagccagctgcgcaagcgcgcccgtgtggccaaggtcggcctggtgcccgagccgatgagcctgaccgtcctcaagattgtgcttgtcgcggtcgtcatcgccttcgtcacctacctgctggcttcctccggtaacgctgatcagggtggtaccccgatcatgctggtgatcgtcggtgtgctggtcttcatctacaacttcatcctgaccaagaccgtgttcggtcgccacgtgtacgccgttggtggcaaccgcaaggccgccatcctctccggtatcaacacccgccgcgtggacttcctgctgttcgtccacatgggcttcctgtccgcagtggccgctgtctgcatgctttcccgtctggcttccgcaactgctcaggccggtatggagttcgagatggacgccatcgctgcctgcttcatcggtggcacggccgtcaccggtggtattggtaccatcccgggcgctgtgattggtgcattcgtgatgggtgttatcaaccagggtctgtcgattatgggtgttgacaccgccgtggtgaagaccatcaagggcctcgtgctcctgctggccgtcgccgtggacatcatatccaagcgcaagaagagctgaccttcccctttctcctcctcgatgtgggattcgtgccggtgccgctggtgcggatcccacactgttatctgccgtcattcttgtaatcaaaggacttttccgccatgaaactcaccgcgcgctccacctcccgtatgtatgcattgacctgcttggcctgcgttatctggctctggcagtcactggtcgaggccaataacgatggctcgctgttcaattgggccactattgtcttctcgctgtgcttgctagtggtcatcggatggagtggctggaatgccgtcaccgggtggaacgccaaggagactgaggccgccacggcgggtgccaaggatgatgagggcagcgctgatcggtagcgtatatacggctgttgttgccggggacatataggtcccggcaaatctgcagcgatatgtgcattgcaagccagggattccctggcttttttatgtcgaaacggaactcgacacgggcgcgcaggccgttgggtttgtctagagcctgcatatagttacttatggtaatgactattggtaactaattggaggttgggccagcgatgtgcgattcccgaaccgataccaagaccggcttgcttccggtgaatgaggtgcggagcctcctggatgtctgctggaaagcgaaggctatcaccgagctgatgccggcactgcccaaaggcctgaaaccgcgctacgtacacgtcattgatgccgtctggcatatcaacgaaacgaatgggcaggaaatcggcaccgcacgggtaagcgatgtcagcgcctttctcggcgtcactacgccgagcgttaccaaactcgttggcgagatggtggagcttggtctggtggtcaagcatatggatgccgccgatcggcgtgcggtgacgctcacgctcaccgagcgtggactagatatccgccgcgtttacgtagaggaataccatgcgcatcttagccagctattgggcgggctgaccgtggaacaatgcgaaaccactgtgcgcacattgaccgaagccctgcggcttatgcaggaagacgcgcagcatcgcaaaagcatgtgaatgaatggaggagagcaacgattatgactgattcagcaacacaactacctcacggcggcaaacaacccttttccggcaagctcgtcatcgcggtcgtctcgcttgcgattctgaccttcctcggcatcctgtcggaaacctcactgaacatcgcctactccacgctgatggaggagttctccatcggcgcttcggtggtgcagtggctcaccaccggctatctgctcttgctgtcagtatcgatttcgagctcgccgttcatggtgcgcaagttcgccaccaaaaccctgttcatcatggccgtcgtgatcttcgccgccggcacactgctgggcgcgctcgcggtcaacttcccgatgctgctcgccgcccgactggtcatgtcgctcggcaccggcatctccttgtcgctcatcaccagcatccactggcacgaagaagcgtgattccaacatgcaacgccctattatgacttcgcggtcgtttttgcgcacgccgtccgaagcggccgggcccggcgacgagcaggtgatcgaagacctcgtagacacgctggaggccaaccgttcacggtgcgtgggcatggccgccaacatgattggcgtaggcaaacgcatcatcgtctttgtggatgaagaccttggcgggcgcataacggtgatgctcaaccccgtgattaccgcttcggacggtgccttcgatacccaggaaggatgcctgtccctgaccggcgaacgccgcacgctgcgttatcgacgtattgaggtcaactacgagaaccgtcggttccgcgcccgccacgccaccttcgccggttggactgcgcagattatccagcatgaagtcgatcactgcaacggcatcattatctgattcatatcggtgctcattgcagcccaactcccgaggctggtcatcgcgattacgatgcgattacatcgcaaccgctatgaccagccttttgtgcactggtggggtgggtgttctcatcggtgttggggtgccatgcgctggcaggttggcttcgctgaggggtgtgggtggtgtcatgtcgccagcggttggctggttggcttcgctggaggttctctcagcgtcggtgatgtgccaaagagtggcgggctggcttcgctaaggagcgctaccgtcggtggagaaccagtgcgtgacctgctgccgacgctaagcgttcattaagcgtcgttagcggccaaaacttggacgtgtaacgatgctgggcggttttagcgtcgttgctgtgccaagtcgtgggcctctgccgacgctgccagtgcagtagcgtcggcgttgggacaggtgttgggcctttgccgactctataagcggggggaaatcattcgctggtgcctaagtgggtctattgccatgctgaatacatctgctgagtgtagctatgcgttcgaaggcgatttcgggacctttctcagtagcaaatatgcctaatgcgcggagttatacacttcaccgtgcacttatacacgccaaacgaagcagaaatcgactgctgacagtggacgacacgccagagacgatgtggataacccagagacggtggataacagctgcgcgatcagtggataacctgcaagaaagtgcggttatccaccgacggtagccactgttatgcacattccataccccttggaatcattgggttttccacttatccaccatctcgccatgtgggcttgcgagccaccgcacgaacgtcatacagtgtgcctcacggcgggcaacgtagcccgccgtccacatcacatgaaggggaaacaccatgagcaccgcaatcactactactgccgaaaatgccggtttgccagcaatgctggacaccaaagacgtagccgagatgttcaaacgctgcaatctcgccgtctatgccgaagcgagacgcatatattatcgcgaagtgaatctgaacccatgcaaaaagtatccgaagcaggtgctgcaaaggatcgaatggtggttctgggattggtttgcctatgactgcgccgtcagcggtattggactgaccggcaatgaatccgaagatttacgtatcgaattgcagtacggtccgggcgcaggtatctcgccattcctagccttggccgaattcatgtatgacaaggacgaacgtatcggcacacgcgagatacgtgattttcgcgaacttgatgacaccaatttcgcttcgatgttctggattcgcgatgccagcgcggtcaaaggtcgtctgacagttgaggacatcattcatggtggtgtctacgaggtggcggacgtacatgccgcctcgcaatacgatggtgcgcacggcggcatgatcgtcaatcgcatcgcacatgtgagaggcgtgtggcgatcctgttccatcccgatctatgaggcacgaaggcctgatgacccgcaaatcggtgattcgctggcccgttcattccgggaaaccggatataaaccggactttgccggtctggtgcggtttttctacgggagggccaaagacaccggtctcgactgggaagatgtggaagccgcgcgccaagccggtactttggacgcgctgatcaagaaggccagcaatcggtgaaggattcgcctaacgctgctgtccaagtcggcggccgcgatcacgaatgaagagtgacgcaaccaaacagaccgcgcacacaatggcgaccgtgcggaacgaagcccgcacgccaatggccgatgccgccgcttccggcactccggtgcgcatggccgccgcggtgtgcgtgttcatgatggtgaccagcagcacagccgcagacgtcatgatcgcgaagcccagtaaggcgagcggccggccaccgatacggtcatacatcttgcctgccaccgggttcaggatgcccatggcgatgccgctcggcatcatcaccagaccggacaccagtgcattaacgccaagatcattctgcaaatatgcccatcgcgtacaggaacagctggcgggtggtgaaggtctcgatgaggaacgcggtgatcgggatcatgatgccgttggtaagcatgaatccggtggtcagccattgcacggtgctgctgggcacgtcgaactcgtgcatcaacgtgggcagggcggagatcatcagcgtttggttgaggatggccacaaacgagccgatcatcagggtgatgaccatggcggtggtgttggcgggggtggtgctgttggagttggcggggtggtggagccggcctcagcggtggccggcgaggaattgcgtgacgtcaattatcaagtctcgtttccttggctgagttgtctttcttggcttgcccatactatctgtgccttgactgcattcgaaaaccattgcaatgactagcaacacgctgagacgcggcgtattaattcaatcatttgacaaacttagttcgttcgttttattattggtcctgcaatccgtaatatcgcctactgcaaaggagcgcccaaatgggtctgtgggatgttgacaagatcgagtacgtcggccgcgccaaaggaccgaaggaagacttcgccttccattactacgatgccgacaaggtcgttgccggcaagaagatgaaggattggctgcgcttcggcgttgcttggtggcacaccttcaaccaggaactggttgatccgttcggcaccggcaccgcgcaccgcccgtactacaagtacaccgatccgatggaccaggctctggccaaggtcgactacgccttcgagctgttccagaagctgggtgttgagtacttctgcttccacgatcgtgacatcgcccccgaaggcgacaccctgcgcgagaccaacgccaacctcgacaaggtcgtcgacaagatcgaggagaacatgaagtccaccggcgtcaagctgctgtggaacacctcctccctgtttaccaacccgcgcttcgtgtccggcgccgccacctccccgttcgccgacatctacgcctacgccggcggccagctcaagaagagcctggagatcggcaagcgcctgggcgccgagaactacgtgttctggggtggccgcgaaggctacgagaacctgtggaacaccgagatgaagcgcgagaccgaccacatcgccaagttcttccacatgtgcgcagattacgccaaggaaatcggctttgaggcccagttcctgatcgagccgaagccgaaggagccgacgctgcaccagtacgacttcgatgccgccaccgccatcgagttcctgcgcaaccacgacctgaccgacgtcttcaagctgaacttggaaggcaaccacgccaacctggccggccacacctaccagcacgagatccgcgtggcccgcgagtccggcttcctcggttccctcgacgccaaccagggcgacaagctcatcggctgggatatggacgagttcccgaccgatctgtacgagaccgtcgccgtcatgtgggaagtcctgcaggccggctccatcggacctcacggtggtctgaacttcgacgccaagccgcgccgtacctccttctacgaggaggacctgttccgctcccacatcgccggcatggatgcctacgccgccggcctgctggttgccgacaagatgaaccaggacggcttcatccagaatcttcaggccgagcgctacagctcctacgactccggcatcggcaaggacatcgacgagggcaacgtcaccttggccgacctcgaagcctacagcctcgacaagccgcagtccgagctcatcgccgccaccaagtccgatcacctcgagtccgtcaaggccaccatcaacaactacatcattgatgccctggctgaggtcgagtgaccatcggtctgaccgattgaattcgctccatcgggcgtgtacacatcaattatgatgccagtgcgcccgatgggctgattcgatagtttcgccatgtgcggtgttgtgttatgcccgcatggcacctttccattccttctttctcctttctctccttccgctgaaaacgggactgtctctcgaagtgtgtaactggccttaactggccggtcgtgtggccggtcggaaaggctggtggacgatgtctgctgggacaaggggaaacatgacaccgacgaagaagccggacgcggaaaaacgcaacgccgagcgggaggcggcgctcacattcgtgcgcatggccaaggaaaaaggactggacctgacagggcccgacggactgctcaaacagttcaccaaaagcgtgctggagacggccctggacgaggagatgaccgagcacctgggccgcgccaagcacaagaaatccaaggacggcagggccgcgaacacgcgcaacggcaccaccgccaagaccgtggtcaccgattcggtaggtccggtcgggatcgaggtgccgcgagaccgcgatggctcgttcgagccggtcgtcgtcaggaaacggcagcggcggctgcccggggtggacgaggtggtgctgtccctgtatgccaggggcctgaccaccggcgagatcagcgcccacttccaggagatctacggggcggacgtgtccagggagaccgtcagtcgcatcaccgagcgggtcgtggccgagaaggacgaatggtgctcgcgtcccctggatcgtgtgtacgcggccgtgttcatcgacgcgaccgtcgtcaaggtgcgcgacgggcaggtcgccaaccgcgcgttctacgtggccgttggcgtggatctggagggcggccgcgacgtgctgggcatctgggcgtcgcccgccgcggagggcgcacgctattggctgtcggtgctcaccgagctgaagaaccggggcgtggacgatgtgttcttcctgatctgcgacgggctcaaaggcctgcccgacgcggtgggcgcggtatggcctctggccatcgtgcagacctgcgtggtgcatctgctgcgcaacacgttccgctacgcgtcgaagaaggactgggacgccatcaaacgcgatgtcaaacccatctacaccgcgccgagcgccgccgccgcggcggcggcccgcgacgcgatgctggacaagtgggaggcgagatatcccgcgatccgcaggctgtggatggacgcgtgggaacggttcataccgttcctggactatgacgtggagatccggcgcgtgatctgcacgaccaacgccatcgaatcgctcaacgcgagattcaagcgctccatccgcgcccgcggccacttccccgacgagcaggccgcgctcaagtgcatgtacctgaccgtccgctcgctggaccccaccggcaagggacggatacgatggagcgcgcgctggaagcccgcgctcaacgcctttgccatcaccttcgccgaccgctggccaagcgagggaacacaacaatgaaaacgccagttacacacttaacgagacaggcccggcatgagttcgagatggacgccatcgcggcctgcttcatcggcggcacggccgtcaccggcggcatcggcaccatccccggcgccatggtcggcgccctgatcatgggcgtgctcaaccagggcctgtccatcatgggcgtggacgccgcctgggtcaagaccatcaagggcctcgtcgtcatcgccgccgtcgcctacgacctgctctccaagaaaaagaaaggctgagctaaacctggcctccgggcccgcccggtggccacggggatggacctgagttccattcctcctccgaaagggacgctgttgcacgcagcgtcccttttccgtttgtcgcgatggatggatcccggtgtacgttcttcgcgaaatcagccctgacttggggtgtatttcgacaatatgattcggcgatgtgcctcagcggatatgtgcggccaatgaaaaagcgggataccgatgtcgatatcccgctttcagcgaataggtaaggccagagcttacttcttcctggctttcttgacgcgcttgggggtgggagccattttcttgggttcgaagaacggccacttgtgcaaagcccaggcgtgcagtgcggggatcttggcaacggcgaagccgatgaccagaccgattaccatggcccaggtctccagatcatggcctgcgaccagcaagccgatgaacactatggcaacgatgaagctcaccatctgcgaggcctttgactgcttggcggtcaccaggtcggccttcatgggaacaagccccagaaacaggccgcaaggtatgcagatgacggccaatatcgcgctgagggttattgacaatgtggttgcatccatgatgttcctttagtgctgtgggttgtggttttctttggcgtctgcggtgtcggtgtctgcggtgtcggcaacgtcgtcgtgttcgttttcttcggcttgttcggcttcggcctcggcgtccgtgctgtcggtttcgtcgtcatcagccgcgtcatccttgccgggctggcgccaccacaggattagcgcgttggccgcgcagtagatggccgcgatgccaatgcataccagaaaaatgatgttcgaagtgctgatgatcgtgccgtcgttcatcgactctttgacagactgccatatccacatcacgcaggcgacggcggtcagggcgtacagcatcatacgggagcggtcgttcataggatcatctccagacttgttcaaacgacttgattatagccgtatttgtggattgcgtgggaaacgaaaaatgccgccatgtgtgcttcagcgaggagcgcggtataacagcggctcttcgcgatgctcgccatggcggcattcatcaggaatcgttattcagttgttatctcatggatttgctggcagcgtatcagccgcgggccttggcgtacgcctcgtacacggcttcggtgggctcgccggtctccacgccctcgatggtgagctgccaggtcggcggttcggcctcgccggacagcacccaggcggcctgacgggcggcgccgatggccacgtattcgtcggtggccggacgggtcacgtccatgccgaggattgagggggccagcgtgcggatggccacggacttcgcgccgccaccaatgagcaggatgcggttgatctcggcgcccagcgagcgaatcagctcgaggcagtcgcgctgggaacacagcaggccttcgacgaacgcacgggccagattctccttggtggtgttgtgtagggtcaggccagtcagcgaggcggtggcgtccggacggttcggcgtacgctcgccgtcgaagtacggcaccagggtgatgccgccggcacccggctcggccttgaacgccagttcggccagttcgtcgtagtccacgcctagggcggcgcgaccggcgtccagaatgcgcgaaccgttgattgtgcaggcgagcggcagatagtggccggtgcagtcggcaaagccggaaatggcgccggtcaggtcgtacaccgggttttcagcgatggccgcggccacgccggaagtgccgagcgatacggacacatcgcccacggccatgccgaggcccagcgaggccatggcattgtctccgccgccggggccgatgatgcagccgccttcaacgtccttgccggcaatggcggggtcggccttgacggcggctgcctcacgcgggcccagcacggtgggcagcacaatggcgtcggcgtgggccttggcggcttcctcgccctcggcaggggccagcaccatggcgatgagatcgcggcggtactcgtcatgcgcggcatcgtagtaaatggtgccggaagcgtcggaacggtcggtgaacagggcttcgagatgagcgtcctcgccctcggccaccgggccatagccggcgatacgccagctcagccaatcgtgcggcagacagacggcggcaatcttcttggcgttctcaggctcgttctcggccacccacgccaccttggtcagcgtgtaggaggcgacgggggaggatccgacggccttgacccagcgttgcttgccgcgggcggtcacgtcgtccggttcgtcgccctcggccggagctgcaccgagcttgtcgatcaaggcggcggcctgcggggcggaactggtgtcattccagagcatcgcatcgcgaatcacgttgccctgcttgtcgagaatgaccatgccatgctgctggccgccaaccgcgagggccgcgacatcgtcaagcccgccggcctgctcggcggccttggtgaaggcctcccaccagaattccgggttgaccgaggtgccatccgggtgcttggcctgcccgaaccgaacctgttcgccggtggcggcgtccgtgatgcggaccttcgttgattgggttgacgtatctacgccggcaaccagtactctcgtcatgcattcctcctcgatgagggtcgcgctcaaaagtttcggcgcgccatagccaataagttagacgattaaactatactgtatctcaacgttcgattgcaaacggaaacacgcgaaggtgcggtccgattcaatcgtttgacgcacaatatcatggtgtgatagacggatgtgagcgcctgtgcggcgctcgagactaggggtgcgaggaggtaggggccaatggcaaatctacgcaggatcaatcaggaggatctgcgcaaccataacctgtcggtgacgctcgacaccttattgcgtgcgcagaaaccgatgagtcgtgccgatctggccaaggagacgggcctgaccaaggccacgctctcgctgttggcctcgatgctcattgaaagcggcgtggtgcaggaaggcgagccggtcgtttccaccacatatgggcggcccagcacgccgctggagattcgcggcggatccatcgccggcatcggcctgcagatcaacaccgatggttacggttgcctggcactcgatctgaacggcgacactctcggccgggagtgggtgagtgaggatatgaccggcactgacccgtacgagatcttcgccaagctcgatgcgatgactttcccgttggaaagccggctcaaacgacgcggctgcaaggtggtgggagccgggtttgcgctgccgggcatcgtcaccgacgacatgtggctgttggtggcccgcaatctgggttgggaaaacgtcaacctcacccggttcaacgtggtgcgccggctggatgtggtggccggcaatgaggcgaagatggccgccatcgctcagattccggggtatgccaccgaacgtgcgcccttcctgaatgtggtggaccgcacggactcctttatttacctgtctaccgatatcggcatcggcggcgcggtggtgcgcgacggcgaagtggtgatgggctcgcacggattcgccggcgagatcggccatctgtccgtggcgatggatgggccgttgtgcagctgcgggcgtcacgggtgtcttgaggcgtttgcgggccgtcgcgctttggtcgaggctgccggcattgccgaggatggggatgccaccagcagcgaggccatcgatatgttcctccagcgttggcgagccggggattcggatgtggccaaagtggtcgatcaggccgccgatgcgctggtttccgccatcgcttccgccgtgaatctggtggatgtcgatacggtgctgttgggcggactgtggacgcacttcggcgacgagctggccaccgtgcttgaaggccggctgcgttcggaaattctgggatacccgaatgtgaagattcgcgtgtttgtgccgccggtggcgctgcatccctcgctatatggcgcggccgaaatgggcttgcgacggttcatcgagaacccgttggggtacatgggggagaagtagcgccgggagatgctgcttgttgctggcgggtgcatggtatgggtgcatggcgcgcgtgccggcattagcgggctcgtgctacactttggcaagttggctgttttacgcagcgaacgtggggccgtagctcagtcggttagagcatgcgactcataatcgcccggtccagggttcaagcccctgcggccccactcttttgcgtcgtctcctgcggcggcgcagcgcgtcttcacgtccagataggcgtgtacaatcccttaggttccggttcacgtcttgccataggggcatgacgacccgggtcccccgaatccataggagacgtaaaatgcagcagggtatccatcctgattatcaccccgttgaggtgacgtgctcgtgcggcaacaccttcgtgacccgcaccgctggcaaggaagatcacatgttcgttgacgtgtgctctcagtgccacccgttctacaccggcaagcagaagattcttgacaccggtggccgcgttgctcgcttcgagaagcgctacggcaagaagagcaagtagcatacttcacgccagtccgattcgatttggcatgctccggcatacccgatcgaggactggcgttttttgtattctttgacaagttttgttgcagcattgacctgcgcaatcgaataatcgaacagaacagcaccatacagaagaaagtgtgttatggcagacgaacagttcccggcggcggcaaccgcgcttgaggagtaccagtccatcgaagagcagatggcaagccccgaagtcgtgtccaacccggacaagctgcgcaagctgggtcgtcgtcacgccgaactgggtgccatcgtgggtgcctacaaagcctggttgcaggtgaaggacgatctggcagccgctcaggagatggccggcgaggacgccgacttcgccgaggaagccaagcgtcttgaagacgaactgcccggtgtcgaggagaagctgcgcaccgcgctgatcccgcgtgacccggatgatgcgcgcgacaccatcatggagatcaaggccggcaccggcggcgaggaagccgcactgttcgccggcgacctgctgcgcatgtacacccgttacgccgagaagcgtggctggagcgtgaacgtgcagtccgagaacaccaccgagctcggcggcgtcaaggacgtgcagatcgccatccgcgccaagggcacgcccgctcccgaagacggcgtgtgggcttcgatgaagtacgagggcggcgtacaccgtgtgcagcgcatccccgtcaccgaatcgcagggccgtatccagacttccgctgccggcgtcatcgtgttccccgaggccgacgaggatgacgacgagatcgagatcgatccgaaagacctgaaaatcgacatcttcatgagctccggccccggcggccagtccgtgaacaccacgtattccgccgtgcgcatgacccacctgccaaccggaatcacggtgaacatgcaggatgagaagtcgcagattcagaaccgtgccgccgcgttgcgcgtactgaagtcccgcctgctggccatgaagcatgagcaggaggccgccgaggccgccgacatgcgtcactcgcaggtacgttcgcttgatcgctccgagcgaatccgcacatacaacttcccggaaaaccgtatcgtcgaccatcgcacgaattacaaggcttacaaccttgacgccgtgctcgacggcgacctgcaggccgtcatcgattccgacatccaagccgacgaggccgaccgtctggccaatcagaaatgactttgccggatggctcccctctgtgaggggagctgtcagcgaagctgactgaggggagcctaatgtccgatcaacggagaccgccagtgcttattaccgacatcatcaaccaagcctcttcgcaattgcgcgaagcgggtattgagacgcctgagcatgatgccaagttgctccttgccgaggcggcaggcgttgaactgcgcgacgtcgacagggctctgcttatgggggaggaacttggcacaaccggacagcttgccgtcttccgtgccatgctcgaccgccgtgccaagcgcgagccgctgcaatacatcaccgggcatgctcctttccgctaccttgacctgaaggtcggtcccggagtgttcattcctcgtccggaaaccgaaaccgtggtgcaggccggccttgactggctgacaaaaaacggcatgatccatccttgtgtggtcgatttgtgcgccggctccggcgcgattgggctgtccgttgtcagcgaggtgcccggcagccaggtgtgggcggtggagctgtcgccgaacaccgccgaatggacgcgaaggaatctgtcggaaaccgcgaaaaagtacccatccattgcctcgaattaccatctggaaatcgcggatgccacgtccttcgccacattggcccaattggacggcaccgtcgatatcgtcatcaccaatcccccctacgtgccgcagaccgatattcccgagcagccggaagtgcgtgattgggatccggaattggctttgtatggcggctcgatggacggtacgttgattcccgagcgcattatcgagcgggcctgccgtcttctcaagcctgggggcgtgcttgtcatggaacatgacgtgacccagggggatcgtctcgtggcctttgccagggccaccggattcgctgccgcatcgaccggccaggactggacgggtcgcgaccgctacctgtttgcagtgtcctaagccccacgaatcccacatttccttgggattgtattctcgtttccgtaattgcgctgtctcataataagaacaatttattgcgggttcaaagccggtctggttataacagtccgcgacaaacatcggatgagagagacgtgaatgacggtcacaagccgtgtgatgtagttctgtggtatgcgaattatgtgagtggaacgtctcacgcgcacatcccgcgcgttggttgacagatgaacgatgttgaaatatcccaaggaagaaggaagaggatgaacgtgaagttctccactaagttcgttgcggccagcgcggccgctgttatggcgttgtccctcgcgggctgctccggcggcagcatggatgattcctccagctccagtgccaaggcctccggcgactccatcaccatcggcaccgtgaccaccaactccggtaccgccgccgcttacggcgaggccgaggtcaagggcttcgagctggcggtctccgagatcaacgccaagggcggcatcaacggcaagaaggtcaagctcgagtccatggacgacaagggcgacgccaccgaagcctccaacgcctacaacaagctcgccggcgacaacaacgtgctcgccgtggccggcccgaccatttccgccaccaccgcagccgtggccccgctggccgaccagtccaagctggtcaccatcgccccggccgccacctccgactccatcgaaaccggcaattacctgttccgcacctgcttcaaggactcctaccagggtgaggtggctgcacgcttcgccgccgagaacctgaaggtcaagaaggtggccgtgctctacggcaccggcgatccgtactcctccggcgtgggagaggccttcgccaaggccgccgaaaagctcggcctcgaagtggtggacaaggaaagctcctcctccgccgacgacaccgagtactccgcccagctgcagaagatccaggcttccggcgccgagctgctctacgctccgtactactactccgtggctggcccgtacatcatcccgcaggcccgctccgtgggtttcgagggctacgtgatgggacccgacggatacgatggcctcaagctcaccggtgacaagtcccagtacaacaagacctactacaccacccactactccgccgacgacaacaccaacaccaaggtgcaggacttcatcaagtcctacaagtccaagaacaacgccgagccgaacacgttcgccgctctgggctacgacaccatctacatgatcaagcaggccatcgagaaggctggcgagaacgccacccgtgaggatgtgcgcaacgccgtggccggcatgaccttcgacggtgtgaccggcaagttcaccatggacaagtccggctcgccgaccaagtccgtgaccgtgctggaaatgaaggacggcaagccggtgtacaacaccaccgtgcagcccaagtgaattccatgaattcccaccgcataatcacgatgtcctagcatgacttccgcatgaacaggagagcgaccggttttgccggtcctctccctttcgtgttttcatgggctcggatgcataaggacagccgtcgatatgcggatatcgccaggcgcgggcgtatcgcgccatcaatcgcaagacatacgaatatctctacgcgcgcagcggtagagaaccacaacattgatagaaagggggagctatgaccgatcagatcatcatgttcatcagccagctgttcaacggtctgaaaatcggcagcgtgtacgcgctggtggcattgggctacaccatggtctacggcatcatccgactgatcaactttgcccacggcgatttcatcatggtcggagcctacgtgctcatgctcaccattccggccatcgtggccatgggactgcccgcctgggtggcggtcattcccgccatcctggtatgcgtggccgtcggcgtgatcgtcgaaaaggccgcctataagccggtgcgtgaaaagggcaactccatgaccgccctgatcaccgccatcgccatgtcgttgctgctggagaacggctcacaggccatcttcggcgccgacttccagaccgtcccgaccatcttccacctgccgtccatcgcgttcggcaagctcaagctgccgggagacaccctgctgaccatcgtcatcggcctggtcatcatggtgggcctgcagctgttcgtcaaattcaccaggcagggcaaggccatgcgcgccgtctccgaagacaaggaggccgccgtgctcatgggtatcaacgtgaactccaccatcgccctgacattcgccatcggctccggtctggccgcggtcgcctcgctgatgtactgcgccgcctacccgcaggtctcgcctatgatgggcgccatgctgggcctgaaggcgttcgtcgccgccgtgctcggcggcattggttccatcccgggcgccatgatcggtggtctggccatcggtctgatcgaaagcctgaccaaggcgtatatcggcaccatcacggcgggcatcatcacctcggcgttctccgacgccatcgtgttcgccatcctgatcatcgtgctgctcgtcaaaccgtccggcattatgggcaagaacgaaggggagaaggtctgatcagatgaagaagacaatgctttccaccaaacagtcctatctggtgtgcttcatcggcatcctcgccgcgttcggcatcgtgatggcgctgtgcgaatccggcttggccgactcctacatcaagggcatcatgatgaccgcgtgcatcgccatcatcatgaccacctccctgaacctcaccatcggcgtgctcggccagctgacgctgggctgctgcggtttcgaggccatcggcgcctacgtggccgcactgacctccaaatacatggtcgccgccggcattgccatcgaccccaccgcccgcttcctgctcaccacgctgatcggcggcgtggtggcctgcgtgttcggcatcctgatcggcattcctgccctgcgactgcacggcgactacctggccatcatcacgctgggcttcggtgagatcatccgcgtgatcatccagaacctcaaggtagccggcggcatgggcctcgacaagggcgccgccggacaggcgctgatcggcatcgaacgcaccgccaacctgtacgtcgtgttctggatcatggtggtcaccgtggtcgtgctcttcatgttcggccgctcccgttacggccgtgcggtcaaggccatccgcgacgacgagatcgccgccggcgcctccggactcaacaccacgtacctcaaggtgctcgtcttcgcgatctccgcgttcttcgcgggcatcgccggcggtatcttcgcccagtacatcggctcgctcaaccccaccatggccggttggctcaactccatcaactacgtgatcatggtggtgttcggcggcatgggttcgctcaccggctcgatcgtctccgccatcggcctgaccatcctgcccgagctgctgcgcgccttcgccgactaccgtatgctcgcctactcggtggtgctggtgctcgtcatgatcttccgcccgcagggcatcttcggatcctgggagttctcactgccgcgtctggtcaaccgcatgctgttccgcggcgccgccggcaagggcgcgaaacccgcggccagcgccaagcagcatgaccagtccgacgacaagaccgtgaaggaggcctcacgatgagcgacgcaacccagcccatcctcaaagccgaacatctcggcatcaccttcggtggtctgaaagccgtgtccaacttcaacatgaccatcaacaagggcgaactcattggcctgatcggccccaacggcgccggcaagaccacggtgttcaacctgctgaccggcgtgtacaagcccaccgaaggcgagttctggctggacggaacccggatgaacggcaagaagacctatcaggtcgtgcgtgccggcatcgcccgaaccttccagaacatccgcctgttcaagcagctcaccgtcgaggagaacgtgctcgtcgccttcgatgagtcgttcacctaccacatgggcagcgccatcttccgcaccccgggcttctggaagcaggagaacgagatgcacgagaaggccatcgacctgctgcgcatcttcaacctcgagggactggccaccacccaggcggccaacctgccgtacggccagcagcgcaagctcgagatcgcacgcgccctggccaccggcatgaaactgctgctgctcgacgagccggccgccggcatgaaccccaccgaaaccgaggatctgctgcactgtatcaacacgatccgcgaccgtttcggtatcgccatcctgctcatcgaacatgacatgagcctggtgatgagcgtatgccagcgcatccaggtgctggactatggccgcaccatcgcatccggcacgccggaggagatcgccaacaacccgcaggtcatctccgcctacttgggcagcgacaacaacgatgacgcggacggcgattccaccaccaaggcggaaccggagccaagcattgccaagacactgacggaaggagcgcgctgatgctggaaatcaaggatctatgcgtttcctatggcgcgatcgacgcggtcaagggcattagcctcaaggtgaacgacggcgagatcgtctccctgatcggagccaacggcgccggcaagaccaccaccctgcacaccatcaccggtctggtgcctgccaaatccggcagcattacttatgatggccacgatctgctcaaaacgcatgcgaacaagatcgtcacgctgggcatggcccatgtgccggaaggccgccacgtgttcacccgcatgagcgtgcaggagaacctggagatgggcgcgttcagtctcaaagaccagtccagtctgggtaaggatcttgagatggtgttcgactacttcccgcgtttgaaggaacgtcgccgccagctggccggcacgctttccggcggtgagcagcagatggtggccatgggccgcgccctgatgagccatccgaagaccatcctcatggatgagccgtcgatgggtctgtccccgctgctggtcaaggagatcttcgacatcatcgtcacgctgcgcaagcgtggcatcaccgtgctgctcgtggagcagaacgcgaagatggccctgtccatcgcggatcgcgcctacgtgctcgagaccggcaagatcaccatggagggcaaggcctccgacctgctgcacgacgagaaggtgcgcaaggcgtacctcggcgcgtgacgtctcacattactatgctcccgctggcgggagctacctcacgaagtgaggctgagggtggttatcggagatttccggcaaccaccctcagtcagctccgctgacagctcgccagcgggagcattcatatatcactgcgcgtaatactgtagcgcggaagcatccttatccgtaatctcgcgaatcggacgggccggattacccacggccacggtgtgcggcggaatatcgcgcgtcaccaccgagccggcaccgatcacgcaaccctcgccgatcgtcacgccgccgattaccgtcacattgccgccaaaccagcagttcgagccgatgacaatcggcttgccatactcgcagtcgtatgcggaaccatcaggtgcctgtctcacgttacgatcctgccaacgcaacggatgcatcggtggcagcagcgaaacgttcgggccgaacagcacgtcgtcgccaatcgtcaccgggcaacaatccagcacagtgaagttgaagttggcgaacacgcgctctccgatggtgatgttgcagccatagtcgaagaaaatcggccccatcacgtcaaggccggcaccgtggccgggcagcagctcatcgagaatcgcggcacgggcggcatgatcggtacgcgacgcggcgttgaagcgcgcgcacaggtcgccggccttctcgcgcagggcattcaattcagggtctaccgaattgtacagtttgccggcgagcatctcctcgcgctcgctggcgcgcggcatacgcagttcgacgggaggcatggtggtggattcagcattgatttcgctcattgaacactcctgtaatttcgcgaaagagcatggatggactcattgtatctacggtctgtgcgtgtggggcgaatcggaaaacggcagtacggcaaacgagcgatgatgaactatgcaagtcggggcgcaatggtgcaatggtagattgtgaatacacaagcgaacggaggtggcgtgagcgtggaaggcggaacaacgctgaaagtcacggatgaatcgctggcacaggcggcgcgtgtcatccgggatggtggattggtcgtcattccaacggatacggtatatggagtggcgtgcgatccgcgtaataaggccgctatcgaccgtatctaccggctcaagcgtcgcccgcgctataaggcgttgcaggtactgctcgcatccaccgaccagcttgatgagctcggtctcgacctgccgtccccgctgaatcgtttgtcggcggcgtttctgcctggcgcgttctcgccgattgccgtagcccggcccgactgcacgttggagactttggccgacaccgccgatggtcgccccggcacgcaaggcatccgcatccccaattcggcgctgtgcctcgcgattctcaaggcgactggcccgctggccgcgtccagcgccaaccgttccggcgacgaaagcgcgcagaccgtccaggaggcggttgacgcgttcggcagcgaagtcgacctgtatctggacggcggtcccacccaaggccatgtctccagcaccgtcgtcaaagccgatccgtacgcgcgcgacggcatcgagatcctgcgtgaaggcgtcatcgcccaaaacgtgattcgcaaggccctccacctcaacggcggtggactcggcgcatgagaatctacctactgattgccgccatcgccggtggcgtcacctggctggtgactccgctgattcgccacgtcgccatcgaaatcggtgcggttggcgaggtgcgtgcccgagacgtgcacaccattcccacgccgcgcatgggtggccttggcatgctgatcggttttgccgtggctaccgtattcgccagtcggctgccttttctctcgggattgttcaacggcaattaccagatgtgggtgattcttgccggcggcatcatgatcagtctgctgggcatggccgatgacctgtgggatctcgattggatgctgaaacttgccggtcagctgctgatttccgtattcgtggcttggggcggattgcagatcatctcactgcctttgggcggttcgctgattaccgcctcgccgagtctgtccatggcgatcaccgcattcctgattgtcgcctcgattaacgcggtcaatttcgttgatggcctcgatggcctggcggccggtatcgtggcgattggtggcatagcgttcgccgcctattcgtatatcatcgcccggtcttccccgagttatgcttcgttggccacgctgatcgacgtgatgatggtgggtatctgcgtgggcttcctgctgcataattggcatcccgccaaactgtttatgggtgattccggttcgatgctgcttggctatctcatcacctgcgcttcgattgtgatgaccggacgtcttgacccggcctcgattcatgccagcatctatctgccggtgttcatgccaattctgctgccgattctggtgttgttcctgcctgtgctcgacatgtgtctggcgattgtgcggcgtttggccaaaggccagtcgcccatgcatccggaccgtatgcacctgcaccatcgcatgctgaagatcgggcattcggtgcgtggcgccgtgctgatcctgtggggatgggccgcgctgatcgcattcggttcgctgacgattctgttcttcaaagcgcagcatgtggccgtgggcatgcccatcgccgtggtggtgctgaccatagccacgatgtacccctatctgcggcatcgtattcccgagatccaagccgagaacctgacgctcgaatccgcacgcaagaacgcgcagcatgctacggttaagtcgcagtctgcagtaggggagagccgggattcgattggctctcaggcagcggattcgatgactgattcgcctgcggattcgcgggactcgcaggcgggtgaggtgcaggacccggcagcggataagtgagcgctcacaagcgtgtgtcgtgaaggtcagcgcgtgttcatatagtgtttgtatggctacaaacctcgatgaattgaacgcccaatcggcgtatgctccccttcctccgattttcgccaagctcggccttgcttatgatgatgtgttgctgctgccgaacgagacggatgtcattccctccgaagtggacaccagcactcatctgactcgcaagatcgtgatgaaggccccggtcctctccgctgccatggataccgtgaccgagtccgagatggccatcgccatggctcgtaacggtggtatcggtgtgctgcaccgcaatctgtccatcgacgaccaggccgctcaggtcgatgtggtcaagcgttccgagtccggtatgatcaccgacccgctgaccgtcaaccccgaggtcactctggccgacctcgacaagctgtgcggcaagttccacatctccggtctgccggttgtggacaaggaaaacaagctcgtcggcatcatcaccaaccgtgatatgcgcttcatcgcctccgaggattacgacaccctgaaggttaaggatgtcatgaccaaggagaacctggtcactggcccgtccaacatttccaaggacgacgctcaccgtctgctcgcccagcacaaggttgagaagctgccgctcgttgacgaggaaggccacctgaccggcctgatcaccgtcaaggacttcgtcaagaccgagcagtacccggacgccaccaaggatgagcagggtcgtctgcgcgtggccgccggcgtcggcttcctcggcgacgcctggcagcgtgcctccgctctgatggaggctggcgtggacgtgctcgtggtcgacaccgccaacggtgaggcccgtctggcactcgacatgatttcccgcctgaagcacgactccgccttcgacggcgtgcagatcatcggcggcaacgtcggcacccgctccggtgctcaggccatgattgaggctggcgcggacgccgtcaaggtcggtattggccccggctctatctgcaccacccgtatcgttgccggtgtcggtgtcccgcagctcaccgccgtgtacgaggctgcccaggcctgccgtgccgctggcgtgccctgcatcgccgacggtggcatccactactccggtgacatcgccaaggccctcgtggctggcgcttcctccgtgatgctcggcggcacgctcgctggctgtgaggaagccccgggcgagaaggtgctcctgcacggcaagcagtacaagctgtaccgtggcatgggctccctcggtgccatggccccgcgcggcaagaagtcctactccaaggaccgctacttccaggccgacgtgacctccagcgacaaggtcgtgccggaaggcgtggaaggcgaagtgccgtaccgcggaccgctgaacgccgtgctctaccagatgctcggtggcctgcaccagtccatgttctacatcggcgcccacaacatcgccgagatgccggagcgtggcaagttcatccgcatcaccgacgccggtctgcgcgaatcgcacccgcacgatatcgtgatgaccaccgaagccccgaactactccggcttccacaacaactgatcggttgatgcccgctagcttgcgctagttaggggttgattccttgtgaaaagggtctgcttatgcaggcccttttcgcgtatgtggctcgagatagcttgtatgcgctggggtatagtctgaactgttcttgtaataacgggtgacatgacgaaaagaggcttaccatggtcgacagccatgatgcagaaacttacagcgcaaaggattcgcgcctgatttggattgactgcgaaatgacgggcttggatatcttcggcggcgacgaactcgtcgaggtgtccgtagtgcccactgactttgacctgaatgtgctggacgagggcgtggattacgtcatcaagccgtccgagaaggccgtgaaccatatgaacgatttcgtgcgccagatgcacacccgttccggcctgatcaacgagtgggagaatggcctgagcctggccgaggccgagcagaaggtcaccgaatacgtgctgcgcttcacgccggaaggcgtgcgcccgctgctggccggcaacaccatcggctccgataagaagttcctcgaccattacatgccgaacctcatgagccacctgcattaccgcagcgtggatgtgagcacattcaaggagctcgcccgccgctggtacccggccgtgtacgagaaccgcccgccaaagaacggtggccatcgtgctctcgcagacatcatcgagtccttggacgagctgcgctactaccgtaaggcgtttatggctcccgcccccggcccggacgatgccgcatccaaggccatcgccgccgacatcgtagccaccagcatcctcaataagtagtccgccgtacttggctcccctccctgaggggagtctagagaggttgatatgcgccaaaccgaagccctggccattctgaacgccggcgcgaacgtgttcctgaccggtgcgcccggtgccggtaagacctatgtcttgaacgagttcatccgccaggctcgggccgacggcgccagtgtagcagtcaccgcgtccacaggcatcgcctccacgcatatcaacggccaaaccattcattcgtggagcggcgtcggcgtggccaccgccctgagcgccagcctgctcaaactcatcaaatcccggcgcaaacgcaagattcaggccacggacatcctcgtcattgacgaggtttccatgctgcacgcttggctgttcgacatggtcgaccaagtctgccgcgaagtacgccgtgatccacgcccgttcggtggcatccaggttgtcttgtccggcgacttcttccagctgccgccggtttcggtgtccgggcgcaaccgcgacctcatcgcccccacgcccgaattcatcgccagtcgcgaacggtatgcccgtgccggcttgaaccccgaaggcttcatcaccgaatcgctggtatggcccgaactcaacccggtgatctgctatctgaccgaacagcaccgtcaggataccggcgaactgctgaccgtgctcaccgacattcgcgaaggcgacgtgacccagtccgaccgtgacgtgctcgtcactcgtctgggcaaactgcccgagcccggccaggtcgccgtccacctgttcccggtgaaccggcaggccgacaatctcaacgacatgcgcctgaaccagatcatgcttgatccacacgagttccacgccgagacagcaggccctgctaacctggtcgaccgactcaaaaagaacatgttggcccccgagcgattgatactcaaggaaggcgcggctgtcatggccctgcgcaacgacaccgatcgccagtacgtcaacggctcgctcggcaccgtgcgtggcttcgcacaggagaacaagggcggctggccgatcgtggaattcgagaacggcaacatcgtcaccatgaaacaggccacatgggaaatgatggacggcgacaccgtgctcgcctccgtctcgcaggtgccgttgcgttgcgcgtggggcatcaccatccacaagtcgcaaggcatgacgcttgaccgtgcggtcatggatctgaagcgcaccttcgcgccgggcatgggatatgtggcgttgtcccgcgtcgaatcgctgggcggactgtatttggctggcgtcaacgaacgcatgttcctcgtctcgcccgatgccgtggtgctcgacggcgacctgcgcgaagcctcggcctcggcctccgaccagttggccgatgaaggtgcaaacgcgttcaaacccgccgagccggacgaattcggtgccaatcccgacgatgacttcgcccaggacgcgttgttctgatctttagaagcgctccgtagcagctaccatggaataagaggtggtagttatggtgctatccgagatatttcgtggaaacaatgaggttcgcgaggccgcccgagccggtgtgcaaatcgatacggtcagtgtggctagtgcgtcagatgcagcaagcgcggcagacggcagcggcaaaatcactggcgcaatacgtccgtcagcggtggccggttcgttttatccggctgaccgcaccgcgctcaaacagctaatcaaccagcagctcgattacggccgaaagcttctgcaacagttggagcccacacttccagcgggggtgccgagggcggtaatagtgccgcacgccggatacatatattccggcacggcagctgcgctcgcttacgcgctcttggagcgtgggcgggggagcgtgactcgcgcggtaatcgtagggccgactcaccgcgtggccgtacgaggcgtcgcctgttccacggcagcggcgtttgaaacgccgctgggcactgtgccggtagacattgcagccgagcgtaaggctctgggcctgtctgtcaatgagccattgcgctccggtacacatgcccgtccgggcgcgccggctcccgcaatgatcgtcaatgccccaacccacgcacaagaacatgcggtagaagtgcagattccgttcctgcagaccgtgctcggcccagacctcactatcgtgccgttgaacgcgggcgatgccacgccacaagaggtgggtgatgtgttgcgtgctttgtggggtggcccggaaaccgtcatcgtgattagttcggatctctcgcactatcatccgcacgaagtcgcccgcgcgttggatgaccagaccattgcggacattgcggctttgcatctgccgattcaccctcgccgggcctgtggcgcatacccgatcaacggccttctggatgtgttaaaaggccgcaaggacatgaggctcttcgagctcggctgttccacttccggcgacgacggcgtggtggcgctcgccggccaacctcgccccgcaatgcgagacgccgacgagccggtagtgggatatgtctcgtttgccgcgtgggaatccaagccggaagcagatgctctagccggtgcagatgacttaggcacatcgggtacgccatcccacggtgaggtgctgctgaaacttgcccgtgccgctatccgggaacggctgcatatcgagcatccgaccgccgctgattcgaccgcgtccattcttgccgcaaacccatggctgaacgagcccggtgcctgtttcgtcaccctgaccgagggtggccggctacgcgggtgcattggttcgctggtcgcccaccgctcgctcggcaaggacgtggccgagcacgcagtggatgccgccacccgcgacccacgtttcaccccggtcaccgccgcggaatacccgctgctcaacgtggaggtatccgtcttgggtgagcccgagccgattacagtgaactcctgtgacgccgattcgcgcggtaccggctcgaagaccgcgactctggcatcgctgcaatccggacctcagaccgacgccgtcaaacgggacggcagcaacgtcgaacgcccggtacgttcgcgcactgaacttgaggaagtattacgccccggcaaagacggtctgattctcgccgaccgtcgtggccgcagcgccacattcctgccacaagtgtgggatgagctgcccgatccgcacgatttcgtcgctcacctgctcgccaaagccggtatccgcccttcctacgactggaccgatagcgaaatcgactgtcaacgctacgaggtgaccgcctatgccgagcattaacgcagcaaccatatctcctcccgctggcaagaggtggcgcgaagcgccggagggtggtcatcgggaatcgtgcggtcatacggcgtcagtcacagatgttcgtaaccccgccatagcccgctggcaaacgcaattccacgacggtaccaaccgcgctcgctgcgaactatgcccgcgccgctgcgtcctcaagcccggccaacgcggcttttgcttcgtccgctcaaaccacgacggactcatcgtctccgacacctacggccgcagctccggcttcgccgtggacccagtggaaaagaagccgctcaaccacttccaccccggttccagtgtgctgagtttcggcacggctggctgcaattccggttgccgattctgccaaaactgggatattgccaaagcccgcagcttcgaccggctcggcatggaagccagtccggagaaaatcgcgcaggtcgcggccgaccggggcatcgattcggtggcgttcacctataacgatccgatcgtgttcgccgaatatgccatcgacacggccgaagcctgccgagcgctcggcatccatcccatcgccgtgactgccggatacatgagcgccgaagcccggcccgacttctacgcggccatggacgccgccaacatcgacctcaaaggcttcaccgaagagttctattggaaagtgaccggcactcatctggccgatgtgctcgagaccatcgactatgcggtcaacgaggcacgcacaccagaaggcgaacacgtgtgggtggagctcaccacgctactcatccctggattcaacgatgacgacgcccagctgcatgctgaatgtacatggatacgcgagcacttgggtccggacgtgccgctgcacttctccgcattccaccccagttaccgcatgatggacgtaccgcccaccccgcacgagactctgacccgcgcccgagacatcgccctcgaagagggactcaattatgtgtacacaggcaacgtgcatgatcgtgaaggcgataccacgtattgcccaaaccctgaatgccgggccaagctcgtggaacgcgattggtatcgaatcattgccaatcgtttatctgccggatacggtggcaatgggcactgccccgtatgcaggactgctatcgccggacgttggtaatctgcctcaggtcgcccgcgcgattcaccgcagatcgccaatacgcgcggcaatcgtcctcatcgatttgaggctcgcctcatagcgcgcggctgccacaatcagaatgatgccgcccaaagcaagccacaatgccggccagctacgcagcatcgggcgtacttgcggcaaacgcacacccacaatcagcgcggccgctccggacaggccggcgataagatccaccggggcatacggttgcgggttggtccatgcaagaccgaggagtattacgccggcaagaatggtggcgcatgtctcaataacctgtgatgcggtcagccgtcccgacgaacgcccgaatcgctcttgcgcgactgatggttggttcggctgggccattgccggattcgggtaggggcagggagaagcataggcccggcccggctgttacggttgatacgggcaggccgcttgttccgggaccgacataggcgattgcgcaaacggtggcatagccattggctgttgcgataccgcttgttgtggaactgccgttgggaattgcgtgggctgcagcagaaaattgcggggcccatgctggggccggttgatacaccggctgctccgaggattccggctgattcccctgttgctcggtcggttgcgtcatcgtgcccttctacccttctagccgtcattgttgcacgagtgagtccgaatgccaagatgaaggtcggaatagtgcgaatagcaggcgggcttgtcggttcacgcgaatatcgtggaacacatgacttccaatacccttcgtatgtcaaccatgttcctgcgcaccctgcgcgaggaccccgctgatgccgatgtcgattcagccaagctgctgcagcgcgccggctatatccgcaaggccgcacccggtatctggacctggctgccgctcggtctgcgcgtgctgaacaagatcgaggccatcatccgcgaggagatcaacggcatcggcgcccaggaagtgcacttcccggccctgctgccgcgcgaaccctacgaggccacccatcgctgggaggagtacggcgataacatcttccgtttgaaggatcgccacgaggccgattacctgctggcccccacccacgaggagatgttcacccttctggtcaaggacatgtactcctcttacaaggacctgcccgtcaccctgtaccagatccagaccaagtaccgcgacgagttccgtccgcgcgccggcctgatccgtggtcgtgaattcgtcatgaaggacgcctactccttcaccatcgatgaagaaggcatgcgcaaggcctactatgacgagcgcggcgcttacgagcgtatcttccagcgtcttgacctgaagtacgtacctgtgttcgccatgtccggcccgatgggcggctccgcatccgaggagttcctggctccgatgccgatcggcgaagataccttcgcgctggcaccttccggcaaggcatggaatgtggaggccctgagcactccggaactaccggaaatcgatgcttccaccactcccgccgcttccaaggaagccaccccggatgccaagaccatcgataacatgatcgagcgtgccaacgccgaccacccgcgtactgatggccgtgaatggcaggcttccgacatcctcaagaacgtggtgatcaccgtcaagcaccctgaggatgaagagcatgacgagccgtggcgtgaagtgattgtcgtcggcgtgcccggcgaccgtacggtggatatgaagcgactggaagcccagttcgcgcccgccgaacttgaggaagccactgaggaagacctgaagcagcaccccgaactggtgcccggttacatcggaccgatggtgcttggcccgcaggccgaggctgctggcgtgaagaacccggttcgctacctgatcgacgcgcacgtggtcaagggttccgcttggttcactggtgccgatgagaacgaggtcgactactacaacctggtgtacggccgtgacttcaaggtcgacggcgtggtggaagccgttgaggttcgccacggcgacatgagcccggatggttccggtccgttgagcttcgagcgtggtgtggaaatcggccaggtgttccagctgggtctcaagtactccaaggcactggacctgaaggtgctcgaccagaacggcaaggccgtgccggtgtggatgggctgctatggcatcggtgtttcccgcgtgctggcctgcatcgccgaaacacaccacgacgaagccggcttggcttggccgtccgtgattgccccggccgccgtgcacgtggtggccaccggcaaggacgccgtggcgtttgaaggtgccgagaagctggtcgccgagcttgaggccaagggccttgaggttatttacgatgaccgcaagaaggtgtctccgggcgtcaagttcaaggatgccgagctgatcggcgtgccgctggtcgccgtggtcggccgcgattacgtcaacgacggcaccatcgaactgcgcgaccgcaacggcgaaaacaaggtcgccgtgcccgccgccgaagccgccgacgcgctcgccgagcgcttcgccgccctcagctgagtcccacttactcagcctcggcgttaatcgcatcaagcgccattctgcccagtcgcagaatggcgctttgttgtggataaccgaaacttatccacattcttaaaatttcaactgcgtcacagtatccacatttgccagttgcccttgtgcgcttcaaacgtcatgcctcacagtggaggtaccgctggggcgtgcaagccggcaatgaagccggagacaggctccggcggtccacatccaaacaacaggccagcaggccgaggaaaggaccgatcatggcaaatcaacaagcagcagtgaccgtcaccggctttgtggccggtgatccgacactaggcggaactgagagtttccgcgtgctgacattccgtatgggcagcacccgcagtcgactcaacccgactaccagacaatgggaggattacggaaccgcatgggtgggcgtcaaagcgttccgtgctttggccgtgaacgccgccagttcggttcgccgcggtgaccgcatcattgtggtcggctcactcatcaccgagcagtggaccaatgagcaaggcgaaccgcgcagtagaaccgttctcgaagccaccaacattgggcatgacctgaccttcggcaccacgtcgctgatcaagccacagcgtgccggtaatgggaacggaggcaatggtggcaacggtaacggcaatgtcaatggtgccgccgaaggcatggatggcggaaacgggcaacgagcatcgtcaccgcacatgaggccaacgcaatatagtgtggacggtgccgcatccggtgtgggcattgacccgtatgcgacctcgtcggaatctggccccgtcgaatttggggtcacctccgattccggccaatcgccgtcgccatcaaccgagtcagcggctgcgtccatggccgatgccgtcatgtcgcaaccggacgctggcgctaatcagccacagtccgcagcccaacaaacctacgtcgacggtttcgccgaatcttccgatcccagcgaatccgaattctgagtgccaaccatacatcatgaaaaaccgctgtgttcgcctgtaatcgaggcaagcacagcggttttctcttacataacggggattaccaaatgctcacacggtccttgggtgcgagccacatggcgtcgccttcggtcacgccaaaggcatcgtagaagaggtccacgttgctggcgatgccgttggtgcggaattcggctggagaatgcgggtcgatctgcaggtactgttcggccagctcgtcgcggttcttggtgcgccagatggaggcgtagctcaggaagaagcgctgcaggccggtgaatccgtccatttcgggggcggtatcgagcagtgccttgatggcggcgggggagccgtcttcttcggcgtcgggcttacctgccgccttgccgagcgcgaatgcatacgccttgagcgcgatgttcacgccgcccaaatcgccgatgttctcgccgatggtcagcgcgccgttcacgtgcggcgccttatcagactcgtcagcgtacttctctgccagctgcagcggcacaaagctgttgtactgggcgatcaatgcgccggtgcgggcctcgaagttcttgcgatcctcgtcggtccaccagttgttgagcttgccgtcgccgtcatactgcgaaccctgatcgtcgaagccatggccgatctcgtgtccgatcactgcgccgataccgccataattcgccgcatcctcggccttcgggtcgaagaacgggggctgcagaatcgcggccgggaacacgatgacgttcatgctcggctcgtagtaggcgttcaccgtctgcggattcatcagccattcgtccttgtcgaccgacttgccgaccttggccagctgatagccggtctcgtacaggttcgcggccttggcgttctcggcgggcagcgcatccgcggaaacactcagcgccgaataatcgcgccagtggttggtgtagccgatcttcggcgtgaacttggagatcttctccagagccttggccttggtgtcctcgcccagccaatcggaattggtgatggacacgcggtaggcgtcaatcagattggcgaccagctcttccatgcggcgcttcgagctttcggggaagtgcaggcgcacgtattcgcggcccacatcttcaccacaaatgccgttgaccaggctcaccgcgcgcttccaacgatcgcgctgcttcttggcaccggagagcaccttgccgtagaagtcaaagttggtggtgtcgaagtcgcgagacagggaggaggcgaagcccagaatcatgtgaacacgggcccacagcttaaggtcggccagatcggcctcggcccagaacgcatcaagaccagtgaggaagctcggctcgtgcacaatgacgcgcgcgaacacagacttgaaatcaatcggctgagccttggcggcttcggtggcgtcataagcggtctgccaagcgtcgatccaagaaccgagatcgaagtttttcagcgtggcggccagatcggcgtaatcggtggggttgtaggtcttcaccgagtcgcgcgtggccacattgtcccaatggttggcggcgatcttggtttccacggcaaggaagtggcgggccatgccgagcgcggcttcgctgggaaccgtggcgggagcgttgctctcgtcatcgccggtgttggacggcagctcatcgccaccgttggactcggcggcgggcgcgtatccggcgttcaccagctgggtggcgaccatcgccacgtatgcttcgcgcacgggagcgtagtgatcctcgcgatagtaggcttcgtccggcaggcaaaggccggcctgctcaaggtgggcgatgttgcggtccgggtcgcccgggtcgccgtaaacggccaagccgaacagatcggggccgccggctgggttgatcgtgccgagcacgcgcgtgagtgcggccttgtcgatggcggaatcgatgaggtcaagctcgtcgcggattgggtcaagcccggcggcctctatggcgtcggtgttgaggaatgagcggtacagggcctcagacttgacagccgggcagtcgtcggcgtcgaggatgtcgcgtacttggttttcggcgtcttcggcaagcttgtcgaaggagccgtagcgcgaacgatcgtcgggcaatcggtaggtgtcgatccatgggccattcacgtagcggaacaggtcgttggtcggcttgatgacggaggagaacgatgccgggtcgatgcccgacgtcagcgtttcggtttcgttggtcatggccctaagcctaatcgcggcgggggagaagcgttgatggtgcagatattgcgttatgggcattgcgctgtcagtgaactagacagattgcctaattgtggtgatggttcaaattagacaacttgtctatcatagtatgtggaatctgaacatggaccttgagctaaggagttacgatgagcaatccgaacgaggaccagtggaatggccagacgggccagcccaaccagagccagccgaaccagccgaatccggcgggtcaaccgggccaaccgcagtatggtgcgtatgacagcaatcatggcggccaatatcctccgcaaggtgcgccgggagcgcaagacactcagaatcagcatgcgcagaacggccagccacaaggcgaaccgaaccagaacccgtactacggcccgtacgcctacaatccgaactatggcccgaacggccagccggcatgggggccggacggtcggcggtatcaggcggacggccaatcgaatagccaagcggacgggcagccgaatggtccatggggcgatcaaagtcaacccggctggcagcagaccaactggtatgtcggcaatttcagtccattccgcctgatcgaggaatggctgccggaaaaagccaagaccaagattcgcatcatttacggcgtggtgggcgtggccgccatcgccttgggcgctgcgctgttgctggtgccgaacaagacgctggctttggccgcattgttgctcggcgtgtatttcgtgatttccggcgtggtgcgcatcgtcagcgctctcgtggagccgggtctgccgggcggctggcgtgtgctggacgtgttcgtcggcattctgctgacctttggcggcgtggtggttgtgcgcaactacggcatgaccggtcagacgctggcattactcattactttgatggtcggtttcggatggattatggaaggcgtgctgtcgctggttgaatcgtggcgtatcccgcattccggctgggccatcgcctatgccatcatctcgattatcgccggcttcgtggtgctgatgagcccgctgagctccgccgtattcatgattatcttcggcggatgcgccatggtggtgatggggattacttcagtgattcgcgcgttcactttcggcaagcgtcgcaagtaatctcacgcttcatgcaaccagtccccagacaatcaatccaaagcgcccgtgcaggctatgtgctgccgggcgctttttctcggccttggccattaatgggctgcgagtggatttcaggtaggcttctggcggttgacctcgggctggtctagagttgagaacaagtctcaacaaggtagaaagaatctcatgatcgaactgaaaacccctcgtgaaatcgaggaaatgaagccggctggtcgttttgtcggcggcattctgaaggaactgcaggagaccaccaaagttggtaccaacctgctcgaaatcgacgagttcgtccacaagaagatcgtggaccgcaagggcgccgaatcctgctatgttgactacgctcctgacttcggcaccggcccgttcgcccactacatctgcacctccgtcaacgacgccgtgctgcacggcgtgccgtacgactacagcctgaaggacggcgacctcgtctccctcgatctcgccatctctgtggacggctgggtggccgattccgccgtcagcttcgtggtcggcaaagacccggaccccgaagacctgcgcatcatcaagtgcactgaggaagcgctcgccgccgccatcgacgtggccaagcccggcaaccgtctcggcgacatctccaacaccatcggcgacgtcgcgcgcgaatacggctacccgatcaacctcgagttcggcggtcacggcgtgggccacatcatgcacggcgacccgcacgtgccgaacgacggccgcgcccaccacggctacaagctgcgcgaaggcctggtcatcgccatcgaaccgtggttcctcaagaccaccgacgagatcttccaggatccgaaggacggctggaccctgcgtgcctccgacggctcgcgcggcgcccactccgagcacaccatcgccatcaccgagaacggcccgatcgtcttcaccgatcgcaccaacctctgatcggcgtttggcgtatggtaggtgcctgattggcctgtgatgggcgatcagcgtctcattagccgtccgtctgttcgcggttttcccgcgaattcgagacgtaacaagccgaagtgcgtttgctttgatagcatgagcgcacttcggctttcgtgtatcgaccggcattcgccagcggtaacacagaagacatagagtaccgaacactagtgttcgcgaacgcgtgaacgttaatgtttggggtaagtggttcatgaagaggaaggtgcgcgaatggcaacggcacaacttgatgtcgattcgaacaagttcaacctgcccgtggttaaggctagtgcagggccggatggcatcgtcgtttccaaactgcgcaacgatggctgggtaacgcttgatcccggattcctcaccaccgcgcagtgcgaatcgaaaatcacctacatcgacggcaagcattcgattttgcgctactgcggttaccccatcgagcaactgtgcgagaactccgattttctggaggtggcgtggctgctgcgccacggcgagctgccgagcagggctgagtatgagcagttctgtgcggacatcaatcacaagacgatggttggcgaagacttccgtaccttcatgggttcgttcccgcgctccgctcacccgatgagcgtgcttgcctccgccatcaatgcgctggccacgttctacccggacaccaccgatatttctgacaacgaccagcttgatgaggccgccaagatcatcatggccaaggcccgtacgattgtgtcgtacatcttccgccgtcgtcgcgatgagccgatgctgtaccccgattacgcgcgcggctatgtggacgacttcctgcgcatgtgcttcgctgtgccgtacgagccgtttgaatccgacccgctgtatgtgcatgctttgggtcgtttgttgattattcatgccgaccatgagcagaactgctcgacctcggtggtgcgtatcgccggttccgcccacgccaacctgtattcggcggtggccgctggcgtcaatgcgctgtccggtccgttgcatggtggtgcgaatgaggccgtactgcgccaattgaaggcgattcgtgattccggcaagtctgtggccgagttcgtgcgtgatgccaaggagaatggccagaagatttccggccttggccaccgtgtatacaagtcgtatgatccgcgcgcggcgattgccaggaagtatctggaaaagatcatggagcgcgaagatacgcagaagctgccgtctgacgagcgcgcgctgttcgccgtggccaccgagcttgaagatattgcgctgaatgacgaatatttcgtatcgcgcaacctgtatccgaacgtcgacttctacacgggcttgatttatcgggcgatcggcttcgatccggccatgttcaccacgctgttcgcgctgggccgcattcccggttggattgcgcagtaccgtgagatgttggccgacccgaataccaagatcggccgcccacgccaggtctacaccggtccggtcgagcgcgatttcgtgccgatggacgagcggtgattgttggtttgagaaagcgcttcgctggagattccagtgaggcgctttctatatgtacagcgcaaaccagctatgctgcgacggctgcataagaactagcagggctagttctgaaattgaaataatgtgtgcggtatcgaggcgcaccgagggaaggcgtacgaaggtacgtcgaccgaggggcaacgaagataacgctccattatttcaatttcagttcttgtgcagcttggcgttgagctcaattcccaccttgcggtagcgggcttcgatgcggccgttcaccgagttgcggataaacagaatgttgtctttgccggagagctcagcacccttgaccacttccagcggttcgccagcggcggccttggccttgtcccagatggtgatcttagtgccggcggtgatgtacagaccggcttcgacggtgcagttatcgcccagagagatgccgataccggcgttggcgccgagcagcgagtgctcgccgatggaattgcgcagcttgccgccaccggacaaggtgcccatgatggaggcaccgccgccgatgtcggaaccgtcacccacgaccacgccttgcgaaacacggccttcgaccatggagacgccgagcgtgccggcattgaagttcacgaatccggcgtgcatcacggtggtgccggaagacaagtaagcgccgaggcgcacgcggtcggcgtcgccgaggcgcacgccggtgggcactacgtaatcgatcatgcgcgggaacttatccacaccgaacacgttgacagtggcggcaggagctgcggcaggcagtccggcctgggaggcgaaagcgagagcggcttcggtggaggcgcgttcgacgtcggccttgcgcagcgtgaagtcttcaacggcgaaggggccgtagttggtccacaccacattggcgagctgggcgaagatgccgtcgaggttcagcgtgttcggcttggccatgcgcatgctcatcaaatggagcttcaggtaagcgtccgcggcattactgatcggctcgtccaactggctgacgacgaataccggcacgcggcgaatgccacgggcgtcggcctcatcgtgagccaaagtaccgaaattgtggttcgggcgatcggactcggccggtgcctcaccgagattcagttcggggtaccagacgtccagggtggtgccggcggcgtctacgctggccagaccccagccccatgcggtacgctcttcgctcatagttgctccttattgttgtacgcgctagtgcacgcttgtggacgcgcgatgcgattaatgattcccaccttagccttatgtgcgcctaggtgagggacgatgcccgcgaaatggcttgaaatcgtatttcccggtaaaaaattaccgagtgtgattggcgatgggatgataggttctccggtgaaattcgctggtgaacaactcgacaaggaggtgtgcgatgtgatgttgcatcattcgggagcataggctgtggccatgcgacgcccggcatcatagagtttgcgcttgagcgaatcgggctcaagaatcactacgcggccatcccaggaatactgcaatgcccaccagaacacagcgcgttcgggagcatcgacgatgacttcgaactgtgtgccgtccggtgaatgtttgatttgagggtcgtcgaaccattcgaacacgttgttgagcatggattcgtctcgtacggccatgcggatgcgaatcggggcatcggctacggggtatggacggtggcgcatgaagttcactgcgtcaaaatcagctggtgctggtttttccagtggcactgtgccgttcctgcctttggcgctgacgttggcgattcggttgaccacgaaaatgcggaggttgtcttcgccatgcaggtggcagatgaggtaatagcgtccgttcttgtacaccatctggtaagggtcggcggtgtaggtaattcggcctgcacccgtacggcttttatgcggtatcaaggtgccatccggtccgtaatcacggtattggaaggttacgccgtggccttcttcgatggcttgattcagctggtcgatagtggataggaactcaccgttgatatgcgtgtaggtggccacatggtccaggtagcctactgcctgcccggcggcgcctgcgagctcgcggattttaccgatgaggtcgtccatggtgtcgaggctgatgcgagatagggtaagactgtctagtagcagtcgcatttcggcagtggacaggaatgcatcaagataccagccgggttgtggattcttgcattcgatgccggcaaggtcgctttcggtgagatgcccgatatgtctgccgagaaattccgtggaggtcagctttttgagctggtttcgtatggtcttctcggtcggcagctcgcttggatcttccagctggtgtttacgggcaagctcatcgagtatttgccgcacggtcaggccatgcccaaagtaactgtgacgccacagcacctcgaagatttcgagggtggtgttccctgcataggatttgcgttgcgccggcttgtctgcatccatacattaaggctaccgcgcgcttcgtctaggatggaaacgttgggttgaaatacattcgctggaaaggaggctcgcccatgagcaaagggtatggtgtgtttggccatgttcccgataatgcggatgacgatggcctcctgccttatgaggatgatgattccggcgtttcctggggccatgcgttgcgtcgtcgcaatccttggaaaagaggagacgacgaagatgccgattacgacgacggtcggtatgacatagatgacactgatgacactaatgggggcaggggcatctatgccggtaaaagcggcggagtaggcggcatttctggtgagacgggtggaatacttggtagctcaggcgcggccggcagcagagacgtaacgtttggtggaacggacagtttgtccgccgccgatgcggtgatgccctatcgtttcaggcaaggacgttccgtatggttcgacgatgaggacgaaggccatttcgccgggtctgcgaagcgtgccgaagcccatgccgtccctatccttgcgttacgcaacgatgtggaatcgtcatcgtcgaatgccgtgctcgctcgtgcccgtagcattgcgcgcaaagcggccaccatggttatcaatccggtatacagcgaaaatcatcgaaccgggtatgccgagcttgacggtattctacgtggcaccaccagcccatcgagtaggtatcgtaccagcgtgcaattcgacctcgatacgggagaagccgtcggtggcaagtgctcatgcccggcttacggccgtggctatggcatgtgcaagcacatgattgcgctcgccttcatattctgcgatgatccgcagcgttttgaaggctaccgtgccggggccgcacgaccgtctcggacgctgattgactatatggagcacgccgataggcaagacgctcaagccaaaattcgtcgtcgcaatgcggttatgcgtcggtttgatgccacgcaagggaaaaacggtgcaaatgctcggcgtacaaaaagcggatacggctctcgtgccggcacccgaggcggcgggtatcagggtgacagcgagactgtgggcttggggcaggtgcagcttgtcccgatattgagtttcatcgacggcgtgtggagcgtggagttcaagatcggctcggcttccaatgggtccagctatgtgctgaaatcgattccgcaatttgtgcttgccatggcgaacggcgactatgcggattatgggcagaagcttgcctttattcatacgccggatatgctcgatgatgattcgcgccccctgctggacgtccttgatgatgcgatggccgtgcgtcgtgcggccgagcagcaggacaggtattacgggcatatcgccatcgaccgtcatctgacgctttcagcaccggaagtggcccggttgctgtccgtacgtgagggcagaggcgtacagctcgtgctgaacacatggttctccgggcagcctgcatcggtgccagttgatggtggcgagccagattttctcatgcgcattgcgcggcgtgatttcaatacgtatggtccggatgccggatacctgcttaccggagtgccagcggtggaaaccgtgattgacggcggcaagaatgtatggctgttgctcgcctccactaatccggccggtgcggtatccgccatggtggcgggctctcagcgtaaaagcgcagcaggatgccgattcgtccgttgcccgaaacgattgattccgttgcgaggactattgggagacctgtttgaacccgatggcgagggacaggtcattgccggcgatgacatcgccctattcgcacgcacgctattgcctcagctggttggtgccggactgttggaggccagtgagattcctcgcgagctggctgaattaagtcctacggaatgcagcctccagttttatctggatcgtgatgagcatggtgtgcaatgcgaggtcaaggcacgctacggcgatgccattgtcccgttgctacccgatggcccgacggtgcatgctgagggcgagcgttccatccccttgtctcggggcgtgattgggcgtgatttcgacgctgagcatcttgcgattgatgtagtgcgtgaattctttaccatgcctgaccagcgcaagcgcgttgcggccgccactcatcagacggtgaatgggttccgaacgccggccgcgcgaaaggccaccaaaaaattcgtgtctgatgcggccactatcgatcgcgatgacaccacgcagatcgttcgtctctttgacgagggattgccggcactaaaggaagtgggggaggtcttcaccacaccggcttttgaccggctgatcgcgcccaagccaccaagcgtcaaagtcggattgtccatcaaaggcaacttggtggagatatcacccctcgctgatgaagtgccgccggacgaagtgggtgccttgctatcttcgtaccgtcggcgtcaacgattccatcagttgaaggacggcacgcttgtcaaactcagcggcgcgaatctcagcacgttggaccgattggccagcgacctcgatctgagcgagcagcagctcaactccggactgatcgagttgccgggcggtcgagcattcctactggatggtgagctgccggatgacggctccgatgtagtcaaggacgcttcgttcaccgaatacatcgacgatctcaagatcatcgaccctaagtcgtatgaagtgccggatagtctcaagcatattctgcgcccttatcaggtcgaaggctttcaatggctgaacacgttgtgcgacaagggttttggcggcattctggccgatgagatgggcttgggtaaatccgtgcagcttatcgcgttgctcctgtctcgatatcagcggaataccggcgagatgggcgacggcagccttggcccatcgctgatcgtgtgcccggcgtccttggtgtacaactggggtgccgaattcaccaagttcgccccgagcttcaatgccgtggtggtggccggtaccaaagccgagcgccgtaccgccatcggccgtgcgttccgggcggatgaacccaccgtgctcatcacctcatacgacctgctgcgccgagatgtcgatgattacaccgccaatgagcaacgtttcaatgtcatggcattggatgaagcccagtacatcaagaatcacaccacgaaaatagccaaagcggtcaaggccgtggccgccgaccatcgtttcgccttgactggcacgccgatcgaaaaccgactctccgaactatggagcattttcgacttcctgatgccggggctgctcggctcatataagcgattccatgagcgttatgagttgcccatctccaatgcccgggccgcggatggcagcacggctgaaggtcgggccgccgcacaagtcaatcctgaggccgctcgggtatctcgccaattgcagtcgttggtgggcgtgttcatcaagcgcaggctgaagtcccaggtgttgaccgatttgccggacaagctagagaccacgctgaccgtgcggcttgccggcgaacagcgcaaactgtatgcggctcacgagcagcggctcagaatgcagctcgaacacagcgaagaagccgatttcaacacgtcgaagattcgcatcctcgccgagttgaccaagttgcgccagatctgctgcgatccgaggctgctgtacgccgatgccaaggatcaatcggccaagcttgccgccatcaccgaactggtggaaacctgtgtgaacgaaggcaagaaggcgctgatcttctcccagttcaccagcttccttgatctgatcgccgaacgtttcgacgcgcaaggcctgcgctactacaccatcaccggctccacgcccaagaagaagcgtctcgaactcgtcgaccagttcaatgcggacgatacgcctgccttcttgatttccctgaaggccggcaacaccggactgaacctgaccggtgccagcgtggtcatccacgccgacccatggtggaacgccgccgcacaggatcaggccaccgaccgagcacatcgtatcggccagaccgaagacgtcaacgtgtatcaggtggtggccaaggacaccatcgaagaacgtatcttggagcttcagcatactaagagcgagctcgcccgccagttcaccgacgcttccttgcttgccgacgaagccggcaccggcgccagcgccctcaccgaagcccccgcctccatcgccaccctcaccaaggacgatctcctcaatctgctggggtgacagagcttctttgtgcactccccatcccgattaagaacatgtgtattcatgggtttgcggatgtgtaggtgaatggtgaaagtgtttttcgatatttttatatcgatattcgatatattatgatggtggcatacggtgcagtgcaggttcatccattgatattgatattggattaaggagcatagccatgaacgctggtatcgcattcatttctcgtaaatctcgcaaaacagacgtcgcttggcgctatgccattgccgtggtgcttgtcgtgtgttgtattgggctcgcatatgtggagattgttgtggcgccgtggtttatcaatgaggtggtgtctatgtttccggagaccacgttgcttaaagaaccgtccatgttctgggaatgggcgattctgctcgccgttcaggcgactttgctgtgcacggcggccaaattggtggtaccggagcgtctgttggctcaagcagctggactgctggatatgattcgtatcgtcgcgcttatcgtcgtgttttcggtaaccactaccggtaacatcacaatctgcctcatgaatttcggaactccgggctttgtatatggcgtggccctatgcagcctcgctgcgatcatcgccatcatcgtgctgctgaaacggcggcgctacagcacctgctccatgccgatgtaatatggagtgagtcccatgcgttcgtagaaggcttgggctttggggttgcaggcccagacgttgagcgttacgttgtggcagccggattgacgggcgaagtcgagcacgtagcgatacaaggtggagcctacatggtggccgcgggaccgctcgtcaacgcatagatcatcgatgtacagggttttgatatcggtcaggatattgctgttgaggtgctgctggaacacgcagaatgcgtagccaagcacttggtcggtggcgggggagtcggcgttatgttcggcgtcattgccgtcattggcagatggcgcaaccgccacgaacacaggggtctgatcgttggccagaatcgccttcaattcctcgtccgtgtatttcttgacaccgcctttgaacagatccggtcggccggcatgatgcacttcgagcacctgccgcagcagttcgtcgatctggggaatatcggccgccgtggccctacgaatcgtcatgtcatccattgaactcagtctaatcgggcagtctcgaccggcagatgattgttgcccgcgataagagacacggacgggcaagatgggtgatcgttcgttcaggctctcattctcgccgcaacgtcacggtagtctggagtgcgtgaatcgcaagaaacagccagtggagaagtatgagcggggtacccgttcgtacacgatgtcgcatattcgtggcaaagacaccaaaattgaggtactggtacgcagctacctgtttcgcaaggggttgcgattccgcaagaacgacaagcgttaccccggacacccggatgtagtactgccgaaataccacgccatcgtgtttgtcaacggctgtttctggcacatgcatgaaggatgttccaaacattcgatgccgaaatcgaacgtggaattctggcaggcgaaactactgcgcaatcacaatcgagacatcgcgcagcgagccgaactggaggccgctggctggcgtgtaattaccgtatgggagtgcgaattaacgaaagccgtgcgcgacgaacgcctcgtacggctgtatgagcagattgttgaaggagatgcagattcagcggaataatttcagctcccctctggaggggagctgaaatcaggattcaaacgggaacttcaggccccaacggtcacgaatcgcatccatcagctccatgatgcggatggtgtcggcgtgcggcatcgcctcgcattcgatcttgccgtccagcagcgcgttggccgcatcggccacctcatactcataaccggtcaactgcggcggcaccgcaatgctgcgcacgggcttgtgggcgttgtcatagatgtcgatggactcgggattgttgatattggtgaccaccagataaccctcggtgccccacacatagccgccgcggtcggaggaaaccagcatcgaactggtggacacggccatcgtgccgtcgctgtaatacaacgtggtggaattctgcgcatccacaccggtttcggcgggcaccatcgacgtatcgaaatgatcaagtgtacggccatggtcggcgccgaccgccatatccaggaagttcagcggatacacgcccacatcgagcagcgcgccaccggcacaggccggatcggtcatacgtgccttgccggacaccggatagcacaggttggcgctcgccgctttcacctcgccgatctcgccggactcgataacttcgttgatgagcttgcggctgggcatgtagcgcgtccagatggcctccgtgcacagcatgccggtttcctcggccacggccagcgcctcacgtgcctgcccggcgttcgcggtgaacgacttctccaccagcacgttcttgccggctttcatacacaggatcgcctgttcggcgtgcagactgtgcggggtggcgatatacaccagatccacatccgggtccgccaccaactcctcatacgatccataagccttgtcaaaatgccattggtcggcaaaagcctgcgcgcgcgtaatatcacgggccgctaccgcatacgggtgaatccatgaggaatacagtgaatcttcagccatctgggtcagggtgccggccatggtgtgagctatgcggcccgcacccagaatcgcgacgttgattttttcgccgctggcctcgaactcggcgcgcttgccattgaatcgactcattattcctccttgaatgcgggttggtgcactcaatcgacctacagtgattatagaagaagaaaccttgtcccgtgaggcggatagaaccgaaatatggaaaacgaagcagcgcagcagccccaatctccggccgcgtctccagtcatgtcccgccgagcgcgtgaggccaatcccttccgtgccatggtattcggcgaacaagcagacaagatgatcgcccaaggtaccagcgtcatcaaattaagccttggcgagcccgatttcggcgcgccgcccgccgtacgcgacgccatgcgcgaacagtacgacggccgggccctgccgtacaccgccgccatgggcctacctgaactgcgtcaggccatcgccgacttctaccgcgagcgtcatgaccttgacatcgaccccaagcgtatctgcgtgaccgccggcggttcggccgccctgctgttggccaccgcgctgaccgtggaccccggtgacgatgtgattgtggccgacccctcctacccatgcaaccgcgaacttgtgcggtcgtttgaaggccgggtcatcgatgtgccgacctcggccgccacccgcttccacctgaccgccgacctgtgcagccagtactggacgagcaagaccaaggccgtaatgatcacgtcgccgtccaaccccaccggcaccaccatcgacttcaacgtattggacgaggtgtgcaagttggccgccagccgcggcgcatggcgcatcgtggacgaaacctacctcgacttggctgaccgggagccggacggtaccgaagtcaaatccgtgctggcctgcgaccccgatgccatcgtatgcaacagcttctccaagttcttcggcatgaccggctggcgcctcggctgggcgattctgccggacgagcccactgtgctggaagcggttgacgatctggccaccaactactacctgtgcgcccacacgcccacgcaacatgcggcgctcgcctgcttcacgccggaaagcttggcggaatgcgaagctcgtcgtcaggaattgctggcccgtcgccgcattgtgattgacgggctcaagcgcatcggtttgccggttgaggtggagccgaatggcgcgttctacgcctacttcgacatctcccgcactggtctggatgcctggacgttctgcgaacgcgcgctggatgaagcccatgtggctctgactcctggccgcgacttcggcgcggccacggcggatacgcatgtgcgcctgagctatgccgcctcacgtgaggccctgaccgaggggctggaacgtctcggaacgttcgtcgaatcgctgtgaacggcgcggcagccggtgtgattgttgtacagtagtcgagtttgtgtgatgttcggctggcctcacggtgttggttgccggccgaacgactcgccatggtggcgcacggctggctgattgcgatggtcggcccgttgttcggccatcacgggttaggtaaggtcaggaataggaatcatggtcaatctgcgttcgcataccacgcgacttggtgtgcttgatatcggttcgaacactatccacatgcttatcgtcgacgccgcccccggcgctcgccctgaccccgaggccagcaccaaatccacagtgcgcctgatgaagtatttaaaggacgacggctcaatcaagaagtccggcatcgaggcgattctggaagccgtgtcccagtgcatgcggctggccgaggaatacgaaatcacccagctgctggttatggccacctccgccctgcgcgaggcgccgaacggcaacaaagtgattcacaagatcgaggaactgattggtcagggcgtcactgtgctgtctggcacggatgaggctcgcctgaccttcctggccgcccgccgttggtatggttgggatgccggccgactgctggtgctggacatcggcggcggttcgctcgaagtggcgatgggctccgacgaagagccgaccgtagcgctttccgccccggctggcgcgggccgcgtcaccactgaatttctgccttccggcatggccacgcccgacgagttggaagacgtgcgtaagaacgtgcgcaagattctggagccgatggtcaaggttttcccgcaatccaagcacccgaatcatgcagttggcacctccaagaccttccgctcgctggctcgcctgtgcggtgcggtgatgcgtgcgccgggccgcgaagattcatggattatgactcgtgagcagttggaagactggattcctcgtttggcggcgatcgcgcctgagcagcgcgtggctttgcccggcatcacgcctgaacgcacgatgcagattgtgggcggcggcgtggtggccgacgagatcatgaaggccctgaatattcaggaagtcgagatctgcccgtgggcgctgcgtgaaggcgcgattttgcgctggctcgaccaattcggccgcacccgcctcggtttctagtcctattgaggggaatcacccaaccgccacggtagccaacaatgccgcatgatcagagccctcgactttgaccaccttgcattgtccggccttcatgccctgatcaagcaccacgtggtcaataccggcgaacattggcacagccgcacggttcgtgggccatgagaacgtaaacccatgtccggattcacgtgcggcatccacgaaccggtcgccaagaaaatcacggaatggcgtgtgatcgtaagtggcgttgaaatcgcccatgaaaatataccgtgtatccgtatgctcgcgcatcagacccaactcatccagcgatcgcttccactgccgccagtagccgggtacgggagcggtggtgtgcacggatacgaatcgaatctgctggccacccatatccaccgtgccgccgggcatgaatgaggcgctggaattcacgtcatcgtcggtcggatcggcaagtggcgtggccgaccagaggccgttaccgaatacgccgtcagacgatgagacctgcgcatacggcagataatgctcaataccagcctcattgagttttttgacgaaatcctcggtggtctcctgcaaagcaagcacttcgacgcgctgatcgcgaaccagctcgacgatggcttgcgggtcggcctgccccttatacacattgaaggtcatgacgcgcgcgtaggcatcgctggtgttgggggaggctgcggccacggcgttctgcgcggcttgggggagtggatcggtcgagtagaagaacggatattgccaatagccattgcatgcgattgcggcgatggcgattagtgcggcaaggatacgccgcgacacgatggccaacagcagggcaatcaagccaagcaacgtgaaccatggcgttgccgataccacaatcggcgcaaatggcagttcctgtaaatcggcaggcagcgcgcgggcggcagcgccggcaagggcaagaagcgcgaacatcgtgacgagaaaaccaagcagacgatgccgtttgtgtggcttcacggcagacttggatactgggcgtgccgtggctctggcagagcgtggcttggcagcggcgcgagctcgtacgcttgcgcctgtggtagtactccgtgcctttgccatgctgccctttcctccggcttgtttactgttactttgcttttcgtgcgatttgccactgtaccgtgtacggcttgtctttcagtgtcttttcgccgtgcgcaagagcagttcgcaccaaaccagcacgaaaaccggccatgccttggtggcgggttctgccaggtagcttacacagactgccatgcgtcttatgtaggctgccacgcgaacatgatgcgactgggcgtgtggccgtgtacaatgaaacgtcgttgcccgagtagctcagtggatagagcaccgctctcctaaagcgggtgtcgtcggttcgaatccgatctcgggcacttggcttcggaaacatgacggtatctcagcctctattcatcggtgatgagccatgggcattaggcatgtgtaaacgtataggttccactatccatcatcccgtcgtgtgaaactatgcaaagacatgtggggcttcacggttgtcgtgagggtccatggctatcgaatacacggaagagaagcggtttactgttgagcaggttgaggcgctgttcaagtcggtaggttgggaatcggcgcagtggccggaacggttgttcaaggcattgcagcattcggatacggtaatcagcgcatgggatggcggctatttggtcggcttggttcgcgtgctcgacgatacgggagggggcgaaagtggcggagtgtgctgatcgggggcaacgtacgtagccgttgacggttatcccgtagcaatgttcacaatacgaccccttgtccatacagtgaaaataacggctgacgttcgacgttgctgcgctatgactagagaccatgagtgaagacaaacagtatgacttctatgtggccggtccgttctttgatcctgaacaaacggcaagtatggaacgtttggaaaagatattggaagaccatggcaaggtactgttcaagccgcggtttgtcagccagatcgaagaagtaggccctgaaggatgctttgcggacgatatccatggcattaatgctgctaaagccgtggtcgccaatcttatggacgaggacccgggcacgatgttcgaaatcggatatgcgcatgcgctgggaatcccggtgtacggctatttcgaaaaccttacgccaatggatcgtgtcaatctgatgattgcgcaagcggtcgaactggtgttcgtcggtcctgatgatgtggcgaaatacttggaaaccggcgagcatacggaagtcgattacatccagttctaaacagctctaacaggttctctgcaagcagggttggcggcgttctcgtacatagtcatgtacgggaacgccgcagtggtatagggatattccaacaagcggcataatggggtcgtgggaaaaccagtcggatacaagtgaagtgtctgaatttcgtaaggagtgccgttatgagtaaccacaatcccatgaatattgccaccgactttgccaaggccacgggaggaaccgctcgcaaagttgttgctttgaccgataaaggtccgttgaatggctttaagaaattcctgtcgcgcggatcgatgattgatatggcggtaggtgtggtgatgggctctgccgttaccgctgtggtcaattccatcgtcgacaatctcatcagtccattaatcggcatgattggcggcgtaccggatctttccggactgctgaccatcacgttcaacaactcgactgtttcatttggtgcgattcttaacgcgctgattaacttcctgcttgttggcgtggcggtgtatttctgcgtgattttgccgattaataagcttcgtgatctcactgctgcccaggatgaggctgacgctgaagaacaggggcctagcgttgaagagcagactctcgccacgctgcaggagattcgcgacgagctgaaaaaggccaataactccgccgagtaatctgctgaatgtacggtgcgacagatttacctggtttgcccgaaataacggattgccggggccatttggtctggacaatccgttgtttcgcgcgtgttttgtagcatccgtggagttacatggggagtatgactgaaaacatcgctgataaggccataaacgatactcgtatcgtcaagcagttcaccaatcccgtcaaggagccgattgacagcgacatcaacctgttcgatctgctcgataaccgcgccaagcgcgatcccgaaggtgccatgatcgaatacaagggcgatgatggcacttggcacccgtacagcgcccaagtattccgtgacatggtcatcgacttggccaagggcctggtcggacttggtgtcaacaagggcgattcagtcgccatcgtctcgcgcacccgctgggaatggaccgcgctggatatggcgatcatgtccatcggcgcgctcaccgtgccggtgtacgagaccaactccgccagccaggtcagctggattttcaacgattccaaagtcacgctcgccatcgccgaagatgacgggcagcgtgacaagatcgaatccgtgcgcgatgaggtgcccaccctgcgcaacgtgttcgtaatcgaggccggcggtctgaacgccatcaagacctacggcgaaagcgtcaccgacgccgaattctgggaatacaaggaagcctcccacggcgacgaccgcgccaccatcgtctacacatccggctctacaggcaccccgaagggcgtggaactgacccaccgcaacttcgccttcctggtgctttccgcgctgcagtacatgcctcgtgccggcgcatggcccaaccgccgtctgctgctgttcctgcccctgagccatgtgttcgcccgattcctggaattcttcagttttggcggcacgatttcgctggccctgagctccaatatgaagacgatggtcaaggacttcgagaccttcggtcccacgctgctgctcgccgtgccgcgtgtgtacgagaaggtctacaacgccgcctcccagcgcgccggcaccggattcgctggcaagatgttcatgcgcgccgccgaaaacgcgcgcgaatggtccaaggccgagcagaagggcgaacagctgccgattgccggacgtatcgcccacgccttctatgagcaggtggtgtacaagaagattcgcacgattttcggtccgaacgccgacttcgccattaccggcggtgccccgatggactctgagctttcccacttcttcaacggcatcggcatgccggtgcttgagggctatggcatgaccgaaacctgcggcccggtgtgtgtgagcttgccagaggacaaccgcatcggcaccatcggcatgccgatgtgcggtatcaccgccggcattgccgaggacggcgagctggtggtcaagggaccgctggtgtgcaggggctaccacaacaaccctgaggtcaccacccagcagatcaccgatggctggctgcacaccggcgatttgggcgatatctccgaagacggcttcatctccatcaccggccgtaagaaagacctcatcatcaccgccggcggcaagaacgtgtcgccgggtctgctggaggcttccgtaatgacctcgcctgtggtcaaccagtgcttggttattggcgataagaagccgttcgtggccgctctggtcacgctggatctggcggatgccaacaaatggctggaatcccagggcgccaagccggaacccgatctggcctcgctggccaagaacgccatcgttcatgccgaggtggagcgtgcggtgaacgccgccaacgagggcgtttcccgcgccgagtcgattcgtaagttcgagattctgcccgacgaattcaccgaggccaacggcatgctgaccccgagcctgaagacccgtcgcgcgcaaatcgttgagcactatcgcgagctcattgacaacgtgatctacgtcccgctgaagaagtaaccatcaactccctctgatccaaaaaagctctctctgacgggggagctgtcagcgaagctgactgagggagagaccccgcggcttgcccgcgaaaaaaacaacagggccgggtgcgacttgcacccggcctcagcttattcagtccaaaatcgccgaaacataatcggcggcggcctgattcagctccgcatcgccgatggtggcggtgccctgtaccaggaacggctcagcatagttcatgccgaccttgtacgccacgacctcaaacgggctcagcagctcctccatggtgtggctgtactcgccgtccttgcggtacttggcggcgtcggaaccagtggtgaccaccagtttgagctccttgcccttgagtgcgtggcctccaccgtaggcccagccggcggtgatgacctcgtcttcccattccttgagtagcgcgggggaggagtaccaatagaacgggaactgaaggattacgcggtcggcagcctccagcagctcgtgctccgtgtcggcgttgacggagaagttcgggtattcggcgtattcgtcgcgcacgatgatgtcgtcctcgccctgtgcggcgagttcggcgagcaggcgggcgttcgcgcgcgagccgtccttaagatgcggatggaatacaagaatcaacgttgacatgggatttcccttctataaactgctgccaatgtggcctaatcaccactatcgtatgccgggaagcagaactcagtccagtccggactcgggtgcgagccgcgggatgccgcgccgggaggcaactcagtcgaggttggactgcgtgcctgcggtggcttcgttggcggcttgctcggcttgtgcttggtcgagcttggcacggacgtcgttgagcagaccctgggcgcgcttagccaaggcctcgccgatctcccattgacgcatcgactggtcaagattgaggccgccggtttccagtgcctggacagcctgaatcagcttgtcgcgcgcctcctcatatggcatctgggcgatgagctcgcgttccttgtccgtcagggacgtggcgggggtgttcatgtcggtggatgtggcgttttcggtcatgatgttctccttatatatacggtatatatgcgtggctgcgtatggcgtgtcacgcggttgcggatgtggtggttgcggtaatgacacccttcttcaaggtgacggtgatgccatccccagggcttacctgcgaagcatcgtctagtacgtggccatcggcggactgcaccaccgcatagcctcggttcaacgtggattgcgggctgagtgcggtcagtgaggcgtgagctcgctcgacggtgagctgggcatcgtccacgatgcgtcgcagcccgatatcgagccgttgcaacgagtcgtcaattaagcgctgatgaggctcaagcatggtgtgcggctgtgtcaggctcgggcggttcgcatatccctcgataagtcgaatctcgttctccacgcgcgaacggacccgcagtcgcatacggtcgatggcaccttcgatgagctgcgactgctcacgcacatccggcaccacgcgcttggccgcatcggtaggggtggaggcgcgcagatcggcgaccagatccagcaatgtccagtcatcctcatgcccgatggaggagattaatggtgtagtgcaggcatacgccgcacgaaccacacgctcatccgagaaaccgatgagatcctcaaacgagccgccgccacgggccacgatgatcacatccacgctcgggtcggcatcgagttgtgcaatggcctgaaccacctcggccgggcattgctcgccctgaacatgcacatggaccaccttgaaggttacggaaggccaacgaaggttcacattggtgatcacatcgccttccgcacgtgcctgaggtgcgcaaatcaggccaatagtcttcggaaactccgggagaggcagtttgtgatcggcatcgaacaggccctcgcccttaagctgcttgcgcaattcgtcgatcatggccttgaggctgccaccggctccgaccttgagaatcgtgtccccgcgcaacgacagcgaagtgcgcttcatccacaggttcggtttgccgtgaatcaccacgcggtcgccctgaacgaactggctggccgcggccgcgaacctgccgaagccattgacttccatggcgatatcctcgaagtcgtcgcgcagcgtgatgtaggccgagccggcgcgacgggtattgatctgcgtgatctggccggtgacccacgcggacggccatcgttccacggcaccgtagaacttctggctcagcacgcttaccggccacggattttgcgcggtggtttcagcggcgcgtgcaggcagctgatcgatagggcgaggctcattcggcagattgatggcgccccgatcgggcgcgaaagtgccttgacccggctcaaagccagacgaggccagtgaagcggcggtcggtggacggccggtagatgagtagcccattgcagtagtcatgcactccactataagtgcgttggttgatgacggtaaaaatttaccgtcgcctgaaaacggtgtgatgatgaatgcaagaaccgtacgaagcgatgtatcagccgatgatggagatggtctggtgcatcagaagaaaggagtcattatggcgaagaaacgggtgctatgaagaggagtgagatatgcgttgcactgacgattgagagtcgtcagggagctcgctgtgcgacacgcgagcagaaaacagttacgctaatcacacacttgtagttttggcgaaaaatagccgaaaaaccctataaatagttcgacacaccactgttgagcactagatataggggtggggatgccgtattcttctagaggttcaagaaaacgatatcaatgtaatttcgtgtggcccacgtcgagtgcggctaaaatgcggaactcaggagagtgttcgccttataggaaaggggtgcccgatgggcgcacaggtgctggaggaaaccgtcaccgataacgagaccaaggtggccgccaaggcctccaccgtgctcgttgagaagcgtgatggtcgtgtggtcgacttcgaccccatcaacatcatctctgcggtcaagtctgctttcggtgacctgaacaaggaagtcggccccgaagaagatgccatgatccgtggtttcgccaaccaagtcgaaggcgaaatcaaggggcgttacaccggccccgccaaaatcgaggacatccagaatctcgtggagcacgccctcattgacgcccacctgtacgatgtggctcgcgcctacaccaattaccgtctcgacaaagacattcagcgtgccaaggccactgatgtcaacgaggccgttgctcgcttcattaatcatgacccgaccctgattcacgagaacgcgaacaaggattccaacgtctactccacccagcgtgatctgctggccggtgccgtgtccaaggccgccgcgttcaacatgctgccgccggcggtgtccaacgcccacatgaagggcgacattcacttccacgatgccgactattcgccgttcactgcccagtccaactgctccttgccgaacttctgggacatgttggccaatggcttcactcttggcaacgctccgatggcttccccgaagtccatcgccattgcggccacccagattacccagatcatgaaggacgtggcctccagccagtatggtggccagaccgccaaccgtgccgacgagcatcttgcccagtatgccaagaaggattacgagaagttccttgaggaagctcgtgagaccatccccgacggcatgccggttgaattcgcccgtcgtcaggtcgagagcgccaagaagaacgagcccgccaagctgcatttcggttcccgtgaaccgctgccgatggacaccccgttccacaccgacgttgacgaacttgagcaagagcgtgaaatcctcgccaagattcgtacccgcaaggccatctatgatgccatgcagaccatggaataccagatcaactccaaccgtgtgtccaacggccagaccccgttcgtgactgtcggctttggtctcggcaccgactggttctctcgtgaagtgcagcgcgcaatcctgctgaaccgtattcgcggcctcggcaaggaacaccacaccgccatcttcccgaagctcgtctttactgtgaagcacggcgtgaacgccgacccgggtgacccgaactacgatctgaagcagcttgccctcgagtccgccaccaagcgcatgtacccggatgtggtgttctacgagaacatcgtcaagatcacaggctccttcaaggctccgatgggttgccgctccttcctgcagggttggatcaacccggagaccggcaaggatgaagaagacggccgtatgaacctcggcgtggtcaccgtcaacgtgccgcgtatcgccatcgaatcccacggtgacaaggctcgcttctggaagctgttcgacgagcgtatggaagtcgcccatcaggccctccagttccgcatcatgcgctgcaaggaagccaccccggtcaacgccccgaccctgttccgctttggtgcgtttggtcgtcttggtgccaacgacaacgtggaccagctgttcaagaacgagcgtgccaccgtgtcgctcggctacatcggccttgccgagaccactgcggtcttctatggcaagaactggattcgcgaccacggctgggatccggaaggcaaggagttcgcgctgtccatcgtcaagcgcatgaacgagctgtgcaagcagtggagcaaagcggagggttaccactattccgtgtactccactccggctgaatccctgaccgaccgcttcaaccgcatggaccgtgaaaagttcggccgtatcgaaggcgtgactgatcacgacttctacaccaactccttccactacccggtgtggttgcagcccactccgatggagaagctcagctacgagaaggacttcccgtactacgcttccggcggcttcatcaactactgcgagtacccgtgcctgcaggacaacccgaaggcgctcgaagccgtgtgggattacgcctacaacatcggcatcggctacctgggtaccaacaccccgatcgaccactgcttcgtgtgcggcttccagggcgacttcgagccgaccgaggaaggcttcaagtgcccggagtgcggtaactccaacccggacaagtgcaacgtcaccaagcgcacctgcggctatctcggcagcccggtccagcgcccgatggtgcacggccgtcacgaggaaattgcccaccgagtcaagcacatgagcggcgaaaccggtcgtgtgacgctggatgacggaaccactcgcgagtggttcgaagagaccaagtagggtttatacttgctcccgctgacgggagctgtagagcgtaagcgagactgagggcggtcatcctttatggtgttgaccaccctcagtccgtctgatgacggacagctcccgccagcgggagctaatgctttccgtaaggagggaatcatgccggagctgcatacgaccaagcccgaacccaagcgccatgactttgcggccggcgagaccgggcgtggcccctccgtaccctccaacggtcttgccaacgatccgaaagccggtcaatgggatggccggcgcatgtccaagcggatgatcgccgactacaaaaccttcattgtcaccgacggagaaggcgtgcgcaactccctttacgtctccggttgccccttccactgcgtcgactgcttcaacgcctccatctgggatttccaagccggccacgaatacacgcaaaaacttgaagacaaaatcatcgaagatctgaaagccccatgggtgcaaggcattacgttccttggcggcgagccattcctcaacactcccgtgctggtgccgctcgcacaacgtatccgccaggaattcggtcataccaaagatatctggtcgtggaccggctacacatgggaagaactcatgcgccccggagaaaccccagacaagcttgaattgctacatctcatcgacattctcgtcgacggccgctacctcagagaccagaaggactcgctgctgcaattccgcggctccagaaaccagcgcatcctcgatgtgcccaagtctctggaagccggcgaaccggtcatctgggccaagctccacgatcaagaacgagatatccccgaaatctatttgaaagaccgcgaagccggcgaaggccaacaggcctcgtagtagcagttctggaatgccgtactcagcaatatcgttggaactgttgggaaaaggccttcccgtgagcgaaatcgcctcgcctcgtgccatgttgggcaggtggtcggactaatattccataagaagtagccgggcgaagccgtccgcagggtatctgccagccgtcccgaaacggttcatgatgcctcaaagcgtgcactcccggaagtcggaattaagaggaacacatggttgacatcgccactgacgcgagcctaaagcccgcttcacacccgaagcccctgcgtgtgggattggacatcggttccaccaccgtcaaggccgtggtgcttgatcagtccgattccctgggagacaccctcttctccgattaccgacgccaccacgccaacgtgcgtgccaccgtggccggcctgttggtcgacatccacaagaagcttgtggacctcggacgcggcgacgaaccgattcgcctgtctatcaccggttccggcggtctggcgcttgctgacaatctgcatgtgcctttcattcaggaggtcatcgccgaaaccgaggcaatcgacaaggaatacccgcaggccgatgtcatcatcgagctcggcggcgaggacgccaaaatcacctacctgaaacccacgcccgaacagcgcatgaacggttcgtgcgcaggtggtaccggcgcgttcattgaccagatgtccacgctgcttgacactgacgccgcaggccttaacgagatggccaagagctacgagaacctgtatccgatcgcttctcgttgtggtgtgttcgccaaaaccgatttgcagccgctgatcaacgacggcgcggccaagcctgatctcgccgcctccatcttcaccgcagtggccacgcagaccatcgccggcctggcttctggccgcccgatccacggtaccgtcatcttcctcggcggcccgctgttcttcatgtccgaactgcgcgccgccttccagcgtgcccttgaaggcaaggtcgacgagttcatcgtgccgaccgacgcccacctgtatgtggcctacggttcggcattgcaggccgacacggattccgacgatcagggccaccatttcgaggcctacacctgcgacgaaatcctgaagcgtttggacgagctgaagaacctgccctccaacacgcccaccatgccgccgctgttccccaccgaggccgaccgcgaggacttcaacaagcgccaccacaaggaacacatccacatcggcaccctcgaaggcgcgcatggcccgcacttcctgggcatcgacgccggttccaccaccatcaaggccacgctcgtcaacgacgaccgtgaaatcgtctggtccagctacgccaacaacgaaggcagcccgctgaccgccgccatcaacatcgtcaagaagattcagtctgagctgcccgaaggcgcgtggatcgcacgctcctgcgccaccggatacggcgaaggcctcatcaccaccggcctgcacttggacgagggcgtggtggagaccatggcccactatcgtggcgccgaaatggtcagccccggcgtcaccgccgtcatcgacatcggcggccaggatatgaagtacttggccatcaccgatggcgttatcgattcaatcgccgtcaacgaggcctgctcgtccggctgtggttcgttcctgcagaccttcgccatgtccatgggcctgacgattcaggaattcacgcaaaaggctctggcttccacccatccggtggacctcggttcgcgttgcaccgtgttcatgaactcctcggtcaagcaggcgcagaaggaaggcgcctccatcgaggacatcgctgccggcctgtgctactccgtggtgcgcaacgccctgtacaaggtcatcaagctgcgcgattccggcgaactcggcgacactgtggtggtccagggcggtacgttcctcaacgacgccgtgctgcgcgcgttcgaactgctcaccgaacgcgaagtcacccgaccgaacatcgccggcctcatgggcgcgttcggcgcggccctcaccgcccgcatgcactacgaggacatcgcggacgacgacaacgcgcacgtcggcgcggacgggcgttccgtcgacgcggcggcggctgaggagtccgccgccggcgacgagccgaacgccgccgcgcacgccggcgaaatcgtcgtcgacggcgtgcgccacaccgtctcgtcaatcctcaccggcgaagccctcaacgaaatgtcgatgaccaccgaacgcgacgtgtgcaagctgtgccagaaccactgcaagctcaccatcaccacgttctccgacggctcgcgcttcgtgaccggcaaccgctgcgaacgcggcggcgacgccaagaagaaacgctccgaccgtccgaacctgtacgactacaagtacaagcgttgcttcgcctaccgccgcctcaccgacaagaacgccacccgaggcgaaatcggcatcccgcgcgccctcaacatgtacgagaactacccgttctggttcacgctgctcacctcgctgggcttcaaggtgatgatctccggccgttccagccacgaactgttcgaaaccggcatcgaatcgatcgcctccgagaacatctgctacccggccaagctcgtgcacggccacatcaaatggcttctcaacaagggcatgaagacgatcttctacccgtgcgtcagttacgaggacaacctcgtgcccaacacggacaaccactacaactgcccggtcgtcgccaactatccgctcgtcgtcggcgcgaacatgcccgaactgcgtgaccccgacgtgcgctacatgcacccgtacttcaacctcgccaaccacgagctcatggtcgaccgtatcgtcgaggagttcgcatgggcgagcgtcagccgcgaagaggccgaaactgctgtcaaggccgcctacgccgaagacaaggtcttcaaacacgacgtccagcaggaaggcctcaaagccctcgcctacatgaaggagcacgactgccgcggcatcgtgcttgccggacgcccctaccacatcgacccggaaatcaaccacggcatccccgaaaccatctgcgcgctcggcatggtcgtcctctccgaggattcgatctgcgaactgcagccgggggagaagctcgacctgaccgacttcctgtccgaaggcgaagaggacccgcgcaagaagaacgcgaacggattccgccacgtcgacgaccgcaaggtcaccgtcaaccgcatgccgttgcgcgtcaccaaccagtgggcctaccattcgcgcctctacgcggccgcgcacttcgtcgcctcctatccgggcctcgaactcgtgcagctcaactcgttcggctgcggcctcgacgccatcaccaccgaccaggtggccgagatcctcgccgacaaggccgacgtgtacacgctgctcaagatcgacgaggtctccaacctcggcgcggcgaagatccgcctgcgctcgctcaaggccgccgtcgaggaacgcgaggcgaacaaggcgcgcatggccaaggccgcgctcgccacgtccgacgagtccggttccgccgagtccgacgccccgcgcaacgcggctcacgccgccgcgcaggccgccgcccgcaaggcgcaggagcaggccgaatccgatctcgccaccgcgcaggccgcgctcgccgaagcgcaggccgccgtcgccgccgccgaagcgaaggttaaggccgccgacaggcccgtggacgcggccgatgccggcagcgacgccgccgcccccgcgaacgcgccgaagtccaccggattccgcaagaccggctccaaggcgcccacgccgggccgtcaggtcctgctcgacgcgacgatggccgcgaacccgaagctcaccaaggcgatgcgcgacgcgtccaagcgcgccgcgaagcgcgacatcgccgatgtgcgtctcgccgcgctcggcgacggcaccacgaacgatgccgcgaacgccaagtcgaagtccgcgaagtcgaagtccggccacaacaacgcgaccatgtcccgttacgcgcaccgtgagaagttcgtcaaggacatgaagaaggactacacgatcgtcgccccgcagatgagcccgatccacttctccctcgtcgaatcggtgatccgctccggcggctacaagttcgacatcctcaagcacgcctcgcgcgaagacgtggagactggcctcaaatacgtgaacaacgacgcctgctatccggccatcatggtcatcggacagctcatcgacgcgattctcgaaggcaaatacgatccagacaaggtgtgtctcgcgattacgcagaccggcggcatgtgccgagccaccaactacttcggcctgatccgcaaggccctgatcgacgcgggttacccgcagatcccggtcatcgcgatctccacgcagggcctggaggacaatccgggcttcaaggtgacgcccgcgctgctgcaccgcaccgtcaaggcgctgatcctcggcgacctgctcatgaagtgcctgtaccgcgtgcgcccgtacgaggtggagaagggcgcggcgaaccgcctgtacgagcagtgggacgtgatcgtgcgcgaggcgctcgaacaccacggcttctcgaagacggccgcgaagaccccgtggctcaagcgccgctacctgccgtaccccgtgctcgcccgagagatcgtgaagagcttcgacgctctgccgttgaaggacgtgccgcgcaaggtgcgcgtcggcgtggtcggcgagatcctcgtcaaataccagccggatgcgaacaaccatgtcgtcgacgtcatcgaatcgcaggattgcgaggccgtggtgcccggcatcatggagttcatgaccacgcgcccgtacatcaccgactggaacgagaagtatctcggcaccggcggcaacaagacgttgtacgcgctcatgcgttggagcctcgaccgctacaacgcgccgatcaaggcggccatcgccacctctcacggcaagttcaagcaagacgatccgatgcccgaactcgtcgagaaggctgccgaggtcacgtcgatcggcgtgcaggccggcgaaggctggctgctcaccgccgagatcctcgagcttatcgaacagggatgcccgaacgtgatctgcgcgcagccgttcgcctgcctgccgaaccatgtgaccggccgcggcatgttcggcaagattcgtcgcctgcacccggaagccaacatcgtttccatcgattacgatccgggcgcttcggaagcgaaccagctcaaccgcatcaagctgatgatcgccgccgccaagaaggcccacaacgccaagttcgccgaggctggcgagccgcagggcttcacctccgcggactgaacgcgcatacacgtaagctcccctctatgaggggagctgtcgcgcagcgactgaggggagtctctagagcgagaaaccgggccggagcctgctatcggtttttcgtatagcgtattgcgggctttcgggcacgcgcgccggccggctcgaatacgatacaaagcatggttactccccgaatcagttacgcgcacctgctcgccaagccgaaccccaagcacgtcgaaagcctactcaagttctttgagaacggccgctcccagcgtggcaccggcggcttcggcgtggagatcgagcacctgcccgtgcacaacagcgacgacaccgccgtgacctactacgagccgaacggcatggaagcgctgctcaaacgcctcgccccctactatgacgaggacaaggaatactgggagaacggtcatttggtgggactcgcgcgccccggtgttgccgtctcgctcgaacccggcggccaagtggagacttcaatcggcattctgaagaagccgtccgacctgaatacgttgtattccaagttccgtcgcgagctcgatccgattctcgatgacctcgacttccgcctgatcaactacggctaccagcccaagtccagcttcgcggacgtgccggtcaaccccaaggatcgttacgacgcgatgaccgactatctcggccgcgttggtcagttcggcccctgcatgatgcgctgctccgcctccacccaggtcagcattgattacgtggacgagcgcgactccatcgaaaaactgcggttgggaaccgtcatcggtccgattctggcgtacttcttccgcaacaccccgtatttcgagggcgagaagaacccgtggccgttgctgcgccagcgcatgtgggattatctcgacttccagcgcacgaatgtgctgccgggcctgtttgacccgcgctatgggtgggaggactacgccattgacgtgctctccacaccgctcatgttcgccgatctgacgcacacgcccgaggccgtggcctccggggcgacgccgaaggaactgcatcgcccggccttccgcgagaacgcgggagaggtgtatccggaccgcgaactcaacccatacgagatcaaccacatcatctccacgcacttcaacgacgtgcgcctgaagaacttcatcgaactgcgccactgggactccctgcccatcgagcgcgccgagcgcctgaccgaaatcgtctcctccttgttctacgtgcccgagcatcgcgaccgcttggaaagctacttcgagggcatcagcgaggaagaggtgttcgaggccaaggccaacattcaggcccacgggcgcgaagccacgccctacggccagccgcttgacttctggaaggaattcttgggattggagggcctcttgtccgacattcccggcgatctgaagcaccccgacgtgttccaggagtaagcgaagaagcatatacagaaaaatctattgcgcgatatcggtgtcgaaggcgtgacagaatgttatgttttggcaccgttttgcatatccggccaaggatattggatgtggttgcgcatgggagtggggagaatgcggatagactggcggatatgacatctgggaattcattgcagcataagcgtgttcgcaagtcgccgggggaacgccggcaggaaattctcgatgccgccgtgcgactgatttccgagcgtggctacaacggtacttctgtgcaggatgtggccgatgcggtcggtgttaccaagcagggagttttgcgatattttcctagcaaagataacctgcttgccgcggtgtatcacgagaattacaacacgtttggcagtgtggaagacttcatggcctccggcctgcctggttcagtgcccgatgatttcagattgcccgcgtatctgaggttcttggtacattgcaattccacgcgacccatgcttgttcagctgttctcgatattgcaggtcgaatcgttcaatcctgcgcatccgttacatgacgagtttgccaatcgtcgggattcaatatggcaatactattcgacatacaactggaacctgccttccgaattcacctcgtttgaggagatccggcccacgttgcgccatgctctggagatcatggatggtgtgcaactgaggtggttacgggggccggccattgacttatgcgatgaatgggccgatctggagccggcgatatttccttcgccgatatgggacgggtatcgctgattcgctgtgtgccttgaaccgaggcttgtgcttgatagcggcagtaagtatgcgggcgaacgaaggggtcgcatacatacggtcgttttggtgtatgtgatgcgcgcggcgtaagcgtgttgtatgctgtcaatagataaactaccaattggtaattaaaaagctgttcgatttcactgaggaaagcgacttcgtatgaccgacaacactacgcctgccgcaactgctgaaaccttaccgtacaagaatcctgatttgctcgctggtgagcggatcgccgacttgctctctcgtatgacccttgaagagaaggtcggccagatgatgcagcttgacgcccgcggcggcgatcttgaggatctcatcgtgaataagcatgtcggatccattctgcataccagccccgaggatttatctcgtgccgccaagaccgtcaatgagaagacgcgtctgggcatcccgttgattatcggagatgactgcatccatggatactccttctggccgggcgccactattttcccgtcccagctcggcatggctgtcagctgggatccggacaaggtcaaggccgccggccgcgccaccgccgaggaggtctcttgtaccggcgtacattggacgttttctcctgtgttgtgcatcgcccgcgacacccgttggggccgcgtggacgagacctttggcgaggacccgatgctgatcggcgaactcgcctccgccatggtcaagggctaccagggcggcgccaaggccggcgaggccctaccgaagaacgcgatcctggcctgcgccaagcatttcgccggttactccgagacccagggcggccgtgacgcctccgaagccgacctctcccaccgcaagctcgaatcctggttcctgccgccgttcgaacgcgtggccaaggaaggctgcggcacgttcatgctcggctacgagtccatcgaaggcgtgccggtcacgttcaacaaatggctgctgaccgacaagctgcgcggcgcatggcaatacaatggcacgctgatcaccgactgggacaacgtcggccgctcggtatgggaacagcatgtcaagcccgattacgtgcacgccgcagccgatgcggtcaaggccggcaacgacctggtcatgaccaccccacagttctatgagggagccatcgaagccgtaaaaaccggtctgctcgacgaatccctgattgacgatgcggtagcccgcatcctggccctgaaattccgcctcggcctgttcgaagacccgcgcctgccggatgccgaacgcatcaaggcggtcatcggctccgccgaacaccagcagaccaacctggaactcgcccgcgaatccgtcgccctgctgcgcaacgacggcgccctgccgttcgccgcaaacaaggccaagcgcatcgctgtggtaggcccgcttgccgacgacgcccagaaccagctcggcgactggaccggcaactccggtcaggtctcttggatgccggatggccagcctcgaggcatgattaccaccgtgctcgacggtctgacccagctcacctccgacgattgcgaagtggtctactcgcgcggcgcgaacgtcatcgacctcgtgcctgaccctgccggcgagttctacccggacggccagcctcgcccgaaaatcggcgtttccgccgccgtcgatcgagcaatgatcgacgaagccgtggccaacgcccgccagtccgatctgatcgtggccgtggtcggcgacgtggtccagctggtcggcgaaacctgctccaccgccacgctcgaactgctcggtggccagaacgccctgctcgacgcgctcgccgccgtctcgcgcgaaaccggcaagccgatggtcaccgtgctcatcagctccaagccgcaggtgttgcccgcctccatcgtgggcgagtccagtgtattcgccaagcgcgtcagcgaccctgaaaccggcaccggctccatcctgtgggcgccgaacccgggcatgcgcggcggtcaggccatcgccgaaataatcctgggcctgaccagcccgtcgggccgactgccgatcaccttcccgcgccacgcgggccagctgccggtctactacaaccagattcgcggccagcacggcgaccggtacgccgacctcacccaggatccggcgttcgcgttcggtgaaggcctgagctacacgacgttcgcatacggcgaaccgaccattacgggcggcgcaagcaacgccgacggcacattcgccgaaaccgacaccgtacgtgccgaaatcaccctcaccaacaccggcgagcgcgccggcgtggagatcatgcaggcctacatcggcgacatcgtgacctcctacagctggaccgaccgcgaattgaaggcgttccagcgcgtcgcactggaacccggcgagaccaagaccgtcaccttcgagatcccggtggcgaactgcacgatcgtggacccggacgccaaccgcatcgtcgagcccggcgaattcgaactgctcatcggccactcctcgcgccgtgaggatttgaagtgcaccacgttcaccgtggcgtagatgagtcagacaacggctcggtaatggcaaagtgggatgcggttcgatgtcgcatcccgcttttcggcttgttgcgctgttgcgtcgccgccggccggcgtcagtcggacgtggtgatgtgctccacatcccagcgcacgccgagcacttcgggcgcgcaactggcgttcgagccctatcagcgcgcccaatgccgtgccgagcacaatgcgtacggtgcagtcgagaatgatggccagagaaaacgtggtgaacatgaggattcacctcctgaaaagtagacgtcaggaacttcccgcacgccctacagcgccagcccgcctcccgcaactacgtcgccgcgttcgggtggttcgggctccgtgcggtgagtgggccgcggccgtatgatggaagcgcgggtggcccgggattggtccgggactgttggatgcggcgggaggtgtcatggttcctattgagcacgtgtacgaccagattcgcgcgtttgccgctgatgccggcgctcgcaaggtcgtgctgttcggttctcgcgcaaagggcgtgaaccggcctaaaagcgatatcgatcttgccgtggccggttgtcccgatttcaatcgcttggagcagaaccttcaggacaatctgtggtcactgcttaaagttgatgtcatcaatctggatgagccgatttcttcatcgctgagggcggagattgagcgtagcggaaaggtgctgtatgaaaaagtatgagaattacgtttccgcattgaattcgctgcgcaaggctcccgaacaggatctcggcaatgatttcatccagagcggcattattgacaagttcgggttgcagttcgagcttggttggaaactgttcaaggcgctgctggcttatgagggagaccctgtttccgcttccggctctccgcgagatgtgctcaaaaccgcttttcaatactatgatttcatggacgaatcgttgtggctgcgcatgctgcgcgatcgcaatgattctgctcatatctatgatgaagaacgagctcggcgtcttgtggacgccatcatcgctgattacatccccgagtttgagcgtgcaaatcaggggttggtcgctcgctacggtgaagcattgaacgattagcgtgacaggtatggcatcgggcgcgctgggtgttggcgaacgaattaatggggtgaacctcggcaattggctggtgctggagcggtggatgaagccggggatttttgccgccagcggcgaggcggacgagatctggctgcatcgggctacgaagtcggctgagctggaggctttgctgacgcggcatcgcgacacgtatattaccgaggccgatttccggaacattgccgcacatggctgcaatctggtgcgtattccagtgccgtatttcgtgttcggggatgtgcccggtcacccgggctgtaccgagtatctggacagagcgttcgactcggccgagcgggccgggctcaagattcttatcgacctgcacacggtgcccggctcgcagaacggattcgataacggcggcctcaccggcgtggtgcgctggcatcgtagcccgcgagcggtcgcctatgcgctggatgtgctggtccgtctggctcgccggtatcgcgaccacgcggcgctgttcggtatcgaagtgctgaatgagccgattgactggctgacgtatgccatgtcaccatcgagcaggcaggcgaaagaccggtccgaagcgcgaggaagcgggcctattccgatggcgttcctcaagcgtttctaccgcgagacataccaccggttgcgcccgattctggcagggaatcaagtcatcgtgttccatgacggcttccgactgggccgttggcgggactggttcgtgcgcgagggcatgcggggcgtcatgctcgatacgcatgtctatctggtcatggccgagcaattcccgctgttccgtctgatcccggatcggtggctgatgggctggtatcgcttgttcgtgcgctggaacgaacgccgcatccgccgggccgcgcgctatacgccggtgattgtaggggagtggtgcgtggctaatggtctggtaaatcgggtggtcgataagcgtacaggcgatggtggccgctccaaggaaaacgccatgcacagtgcatctatcagaggctctatttaccgcgagatcgccgccatgcaacgcaaggcatggaacgtgtccgccgggcaaatctattggagctaccaattacgtggtaatcgtgatttcttgcctaccatcgacccgcaatccgacacgtcacgcctcgacccttgggatttcactcacgtctggcacgctggttggatggtgtaatgagaacgaaattgctctctggtggcatgattcgagccaattgtgtaaggtagagaatgagcttcgtgacccggcctatcctttgcggcggggtgggttgcgggttcgagatgagaagtcagccgccgctggcacttgattcgtccgcgcggacgaataccgcgaaagcagggtgcctagcccagtggctgggtgatacggttgggccaaccgaagccactaccgattccacttcgaaagtagtggatgatagtcatgcagaagactgtaaaacatggcttttcatctcaggagggacatctggctcagatgtccctcccttatttttcggcaaagggggagccgtgaatataacgaagacaaaggagtatgcattggcgcaagcccatgctgcggctctcctgtatcatgagcgacttgaaggccgttcaataaaaaatcactgtgaagatgatctgactcttgccattgtttgggactcgggaaatttcgctcatctatgtggcttggattattatctggatgattccaagcgatgtcgtcttcctcctagaaagctctatgaggatttgcttaggggacgcagaatctcacctaagcgagtgagtcctctggggcgccgatcatgaccgtggggcctccctgaatgcgggcctgaatctggaaatgccgccgagctacaccgacgaccagattgtctacgccgtccgcgacggcctaatcatccccgcccagctcgatcgtatggctcagggcatgattgacttggtaaacaagacccgcgctgcaatgagcatcgataattaccgtttcgatgtggacgcccacgatgaagtcgcccatcaggccgctattgaatccattgtgatgctcaagaacgatgatgcgattctgccgctgaacgccggtccagtcgccaatccgtccgccacgccccagaagatcgccgttatcggcgaattcgcccgcaccccgcgctaccaaggcggcggctcctcccacatcacccccaccaagatgaccagcttcctcgacacgctcgccgagcgcggcatcaaggccgacttcgcccccggcttcacactcgatctggaaccggccgacccggccctcgaatccgaggccgtggaaaccgccaagaacgccgacgttgtcctcatgttcctaggcctgccggaagccgcggaatccgaaggcttcgaccgcgacgccctcgacatgcccgccaagcagatcaccctgctcgaacaggtcgccgccgcgaaccagaacgtcgtggtcgtgctgtccaacggttccgtgatcaccgtggccccgtgggccaagaacgccaagggcatcctcgaatcctggttgctcggccagtccggtggcccggcgctcgccgatgtgatcttcggccaggtcagcccgtccggcaagctcgcccagtcgattccgctggacatcaacgatgacccgagcatgctgaactggccgggcgaggaaggccacgtcgactacggcgagggcgtattcgtcggctaccgctactacgacacctacgggcaaggctgtcgactacccgttcggctacggcctgagctatgccacgttcgagatcaccggtgtcgccgttgccaagaccggcgcgaacgccgccaccgtgaccgccaccgtgaccaacacctccgatgtggatgccgccgaaaccgtgcaggtgtacgtggctccgggcaaggccgacgtggcccgcccgaagcacgagctcaagggcttcaccaaggtgttcctcaaggccggcgaatccaagaccgtgaccattgacctcgacgagcgcgcgttcgcctactggtccgaaaaatacaacgactggcacgtggaggccggcgaatatgccatcgaagtgggcgtgagctcccgcgacattgccgacaccgttgccgtggccctcgatggcgacggcaagacccagccgctcaccgaatggtccacctacggcgagtgggaggccgatccgttcggcgccaagatcgtggccgccgtggccgccgccggcgaggccggcgagctgacgaagctgcccgacaacgccatgatgcgcatgttcctcaaccccatgccgatcaattcgctgcccaccctgctgggcgaaggaggcaagaagatcgcccagttcatggttgacgagtacgccaagctcgcgaagtaagggctgaagcgaggcaatcgcacggcgtaatacagctggcttccctctcctgaggggggccagctttgtttaggctcaacagttgtttggagacactacaacacgccgattgttgtatgtgcaactgttgtatatgggtctctttatcatgaattgttgcgtatacaacaatgtggggtgaaggtacaaacgcacacggccccgcatggtacggaggacaatggatcagcatattctcagcatcgaaatgcgcgcggtaaccaaagccgtcgaccgctatttgggcgagagcatgccgcaaaccgctagggaaaccaccggcggcaacgcgcatatcatcatgttcctggcgcgcaaccgcggtcgtgagatctaccagcacaccatcgaacagaaattctgcatcacccggtccaccgcctcgcgtgtgctggccctgatggagaagaagggcctgatcgcccgtgaatcggtggagcatgacgcgcgctgcaagcgcatcgtcctgaccgacaaggcggacgcgatcgtcgccgatctcaaggcgaacggcgatcgggtcgaacggttgctggtcggcggcttctccgatggcgagaaggccgctctgcgcgactacgtcgcacgcatgcgtgcgaacatcgagcgtgcacaacgcgaatttgaacatcaaacactccctcagtcacctgtggtgatggctcccgatcaagacggagcagaggttgctaacacgaaggaggagaacgaatgagcgataccgcagaggcaatcgcgcaggcgcgcaaagccgtcgaaccggacaagcccaaacatgtactgcgcacgctgggccattcgattcgtgaatacaagaaagccagcatcctggctccggtgttcgtgacggtcgaaggcatcctggagatcctgatcccgaccatcatggcttcgctgatcgatgagggtatcaccggtggcagcatgccggccaccgtcaagttcggcgtgattctgctggtgtgctcgatggtttcgctgggtgccggcttcctgtccggaaagtacgcggccgtggccggcgcgggcttcgccaagaacctgcgcaaggaccagttcgagaaggtgcagggcttcagcttcaccaatattgaccggttctccaccggttcgatcgtgacccgactgaccaccgacgtgacgaacctgcagaacgcctacatgatgatcattcgtctgggcgtgcgtgccccgattatggtggtcgtatcctggctgttctcgttccgtatctccccgtcgatttccatggtgttcctggcctgcatcccgattctggccatcggcctgtgcggtctggccgtgctcgtgcatccggtgttcgagcgcgtgtttcacacctacgatgcgttgaacaacgtggtcgacgagaacctgcagggcatccgcgtggtcaagtcctataaccgcgaatccttcgaggtctccaagttcggccgcatctcccagcgcatcttcaaggacttcaccaaggctgagcgcatcatgagcttcaacagcccgctgatgatgatctgcatctacggttcgatgatcctcatcgcatggatgggcgcgcagcagatcgtcgcctccggcaacaaccccgccgtgggcctgaccaccggcgacctgaccgcactggtcacctacgccatgcagatccttatggccatgatgatgctgtccatgatcttcgtcatggtgattatttctcaggcttctgccgagcgtatctgccaggtgctgcaggaggaaagcacggtgcagaacccggcacagccggtgactgacatggccgacggctccatcgaattcgaccatgtcaccttccgctactccgacagttccgaaaagcccgtgcttgacgacatcaacctgaagatccgctccggcatgaccgtcggcatcgtcggcggtactggttcggcaaagtcgtctctggtacagctcgtgccgcgactgtacgacgtgagctccggttcgctgaaggtcggcggcgtggatgtacgcgactacgatctcgaggcgctgcgcgatcaggtggccatggtgttgcagaagaacgtgctgttctccggcactattgccgaaaacctcaggtggggcaacccgaacgccaccgatgaagagattcgccatgctgcgcagctcgcgcaggccgatggattcgttcaggaattccccgataagtacgacacgtacatcgagcagggcggtaccaatgtgtccggcggacagcgccagcgcctgtgcatcgcccgtgcgctgctgaagaagccgaagattctgattctcgacgattcgaccagcgccgtcgataccaagacggacaagctgatccgttccgcgttccacaacgagattccggacaccacgaagatcatcatcgcccagcgcgtggcctccgtgcaggaatccgacatgattctggtgatggattccggccgcatcatggcgtccggcacacacgacgaactgctcgccacctgcgatgaataccgttccatctacgaatcccagaccaagaaccaggcccagcccgaagaactggccgctgccgaacaggctgctgagtcatctaccgctgagccgtccgaaaccgtgacggtgacagtgaccatgcccacggccgataccagcgcagctgatgccaatgcagccgataccaaggaaggagaagcacgatgagcaacgaccagagtttcaagaaccgcaagcccgccatgggcaaagccgagcctggcaccatcaagcgcatcttcagctacatcttccagtacaagtggcgtgtcatcgccatcgtggtgtgcatcttggtcggtgccgccgcgcaggccggttccgcgctgttcctccagtcgctcatcgacacgtacatcctgccgatggtgggggagtcgaactccgactgggccccgctgctgcgggccatcagcctgatggcgggcctgtatgtggccggcatcgtggcgtcctggctgtggcagtggctgatcgtcaccgtcgagcagggcacgctcaagaagattcgtgacgacatgttcgcccaccagcagaagctgccgatccgctacttcgacagccacgagcacggcgacatcatgagccactacaccaacgacaccgatacgctgcgccaggccatctcgcagtcgttcccgcagatgttctcctcgattatctccgcggtcgcggcgctgctgtccatgctgtggctgtccattccattcaccgcgttcgtaatcgtgttcaccgttctgctctacttcatcgtgcgcaagatcgtgagccgctccggccgctactttgtcaagcagcagcagtggatcggcgacgtgaacgccttcgtggaggaatccgtcaacggccagaaggtcatcaaggtcttcaaccatgaagacgccacccagaagaccttcgacgagaagaacgaggaactcttcgaggcgtccgccgaagcgaacacctggggcaacgtcaccatgccggtcgtcggcaacatgggctacctgctctacatcctgcttgccatcgtcggcgccgccgtctcgctggccggcgtcaacgacatcggtctgaccggcgtcaagccgctcaccctcggcacgctcgtctccctgctgaccctatcccgctcgttcatcaacccgatcggccaggtctcccagcagctgaccatggtgatgatggcgctcgccggtgcctcccgtatcttcaagctgatggacgaacccatcgaggaagacaagggcaccgtgacgctcgtgaacgtggaacttggcgaggatggccgcaccatgaccgaagtcgaccacgagaccggccactgggcatggaagcgcgaggtcggcgacgacggtacgaggtctctgaaggccgcagaaaagctcaagggctcggcccgcgaggtggcgatgaaggccaaggagcaggcgatcacctcgcccgacggccgactgaccctgctgcgcggcgacgtgcgtttcaccaacgtgactttcggctacaacccggacaagccggtgctgcacggcatcacctggttcgccaagcccggccagaagatcgcgctcgtcggcgccaccggtgccggcaagaccaccgtgaccaacctcatcaaccggttctacgacattcaggaaggccagattctgtatgatggtatctccgtggccggcatcaagaagcctgacctgcgcaggtctttgggcatcgtactgcaggacgtgaacctgttcaccggcaccgtgatggacaacatccgttacggccgcctgaacgccaccgatgaggaatgcatcgaggccgcgcgtctggtcaatgcggacagcttcatccgtatgctgcccgagggatacaacacggtgctggaaggcgacggttccggcctgtcccagggccagcgccagctgatctccatcgctcgcgcggcggtggccgatccgcctgcgctgatccttgacgaggccacgtcctcgattgatacgcgtactgaagaggttgtgcaagctggtatggataacctgatgaagggccgtacggtcttcgtcatcgcccaccgcctgtccaccgtgcgcaattccgatgtgatcatggtgctcgaccacggcaacatcatcgagcgtggttcgcatgacgagctgatcgcgcaaaagggcgagtactaccagctgtacaccggtgcagtggaactggagtagccggtacgcctgcaaaaaccgcacctcgattatcgggttgaagcaattctcatccggtggttgaggtgcggttttctatgttgagagccgtgtgttagcgcaggattacgaatattggcggtgaaaagggtacatttgaattgttgttttgacgatgtatcggccgcaaggaggggactatggcgttcgtgacgttgaaggatgtcgctcaacgtgccggtgtgtcggctgctgccgtctcccaaatacttcacaataaaggccgcttttctagcgatacgcgacagttggtgctgaatactgttgaggaaatggggtatgtgcccgatcaacgtgctcgctccatgcgctcgtcggatactaagactgttggtttgctggttcctgatttgcgcaatccgtatttcgccgatttggtctcgtcaatggaggatgagttgtatgcccggggctattccacgctgattggtacttcagcagaaacagtggaacgccaggatgcgtttattgacaatctgctcgggcagcgtattgatggtgcgatcgtggtgccgcaaggtgtcaattcgcctggtatgcagtcgcttatcgcgcgcgagctaccactggtgttcgtggatcgtttggtatcgggagtaaattcggtgccattcgtagtgtccgacccatacccaggtgtttgcgaggcggttgccgaacttgtgcgcttagggcatcgtcacattggatttgtgtcacactcgtcactgggctcgtccaatataaatgagcgtgaagcggcattccgttctgctgtggcacaggtgacgcagttgggggagggaactgcggcggttgtcgactgtgattctacatatgtttcgcgcgaagcaggactaaatgaacttgtaagagcaggtgttacggcgattatttgcgcttactcgcctgacatgatcacgatgattggtttgctgcatgaccgcggcattgatattggtagtgaaatgtcagtgatttcattcgatgacattgccgtattccgtctgctgactccgcaagtcgcgattatttcgcagcaagctgaggatatgggtcgccagggcgtggatatgttgctcgacatgattataaataatgattgcagtcgtggtgaatcgcgctatgtcccgtcatcgtttgtactgcgtgattcggttggggctcctatgtggcgtgttccctgatattgcagcgtttatcaggtgcatgaaggctgggtttatgcgctgaacagtgctgacgtgccgacatcgttgacaacattggtaaaaggttatatcataattttcattagttgattaaacgttttatcaatggcgatgatcaacgatgatcggtttggaggaaactcacagaggaggtgagcgggcaatgtgcatatcgattcagcaagacgcgctgacagccgaactgtacgtcagcgttcgcgacgctgtgggtttctaccattacgaccgcgaagacgcgcgtatggcgctggatggtgggctgtattccgtggttgcctacgttgatggtcaggtggccggaattggtcgtgtggtcggcgatggacgtatcgcattcttcatcaaagatctcgtggtattaccgcaataccaagggggtggagtcggtacggcggtgctgcgcgcacttatcacacgcattcgagaacactgctgcaaccatgcgtacattggcctgatggcaacacctggcaaggaatcgttctacgaagagcatgggttcctgcgccggccggcaccgggttatggcagcggattagtccaattcgttgatcccgttccgctcagcgcagctgaatccaccgccacaagcggaatcaagtaatcggctcgccgagcactacgcataacacgtatatcaacacaccgcgaaaggaaccgaacaagcaatgaagcagatccctctgattatcgacactgaccccggcatcgatgacgccgtcgccatcgcactggcagtgttcaacccgcgcttcgacgtgcggctgattactacggttgctggcaatgtcagcattgaagcgacaacgacgaacgcgctcaagctgatggcctactacggtaaggatgtaccggtcgctcgtggcgctgctgaaccgctgatccgtcagcttgatgatgcaagcgatatccacggtaaaaccggtatggagggattcgatttccctgagcccaaaactgaacttctgctggataagcatgctgtcgaagcaatgcacgacgagatcatggcttctgctgaacccgtcaccgtcatgccaatcggtccgctgaccaacatcgcactgttgctaaaaacttttccggaagtcaagtcgcgtattgagcgcattgtgctcatgggtggttcggtcactcgcggcaacaagggtgttatggccgaattcaatattttcgttgaccctgaagccgccaagattgtgctcacttctggtcttgacattactatggccacactggacgccggcttgggaactgtgattccgccggagaaaaccgctcagcttaaggatatgggcaaggtcggtctgatggctcatgacctgttccagcgctaccgcaagcgcagcttcggcaccggtctcaaaatgtatgacgcttgcgcagtcgcatgcttgctggagcctgacctattcgacatgactaaggcatttgtggacgtagaaatcgctggcgaactcactgcagggtgtacggtcgttgatcttaagggctaccttaagcgcgaaccgaatgccaccgtcaccaccggcgttcacgcagatcgattctgcgactggttcatggacggcatcgcccattgtgcatagtcccttgtctcttcgacgccgctaacaccggcgcccctgagcgcatcaatattcgtgaattcaacaacagagaataagagaacaaagaaaggaccagaccgatggaactggtgattatgtacctcgtggcaattgccgcggttggcattgtgggctttatgctcgtgaagaaaatggacatcaagatttccctgttcctcatcggcattgtgctgatgtacatcgcattgctgatgggcaaggacatctcattcaccgacttcgtttccagtggtgtcacttggcttgatccgttcaaggttgtaggcgatcagttcgtgagcacgctcacttctgctggcttcatcatcctcatccttggtggctacaccggctacatgtcccatatcggagccaatgaagtcacggtaagtgtgctcgccaagccgattgcgcacatcaagtccccgtatatactcgtgccgattaccttcttgttgggcaacctgttgtctctggtcattccgagtgcttccaacctggctatcatccttatggcaacgctgtacccggtgcttcgccaagctggtatgagcctgctgagcgcagctgcagtcattgccactactgcaacgattatgccgaccccgcttggctccgacaatgttgccatcgccgctgaactcgctaagaccgacatgttctccggcctgaccgccagcgattacgtcttccgttatcacgtgctcgtttccatcccgaccttgctcgtcatggcactggcacactacttctggcagaagttcatggacaagcgcgctggctcggatttgaccgacggtgatgttgacctggctgaggttaaggctgtcgaaggtagcgctctctaccgcactgtgtatgcgattttgccgctgctgccgatcatcatgcttctcatcgtgttcgccatcacttccaccaccggcgcaaagatcgacctgagtgttgaactcgcttccattctctccttcgtgatcgccattatctgcgagctcatccgcactcgcaagggcaaggaaaccctcgctggcaccgagtccttcttcaagggcatgggtggcgcaatgccgattgtggcactgttggtcgctgcttctgtgttcgtcgttggtcttaagtccattggtctgatcaccgaactgcagaacgcaatgaccggcctgtccggctctggtatgggcttcgtgctgccgcttatccttgtcggcctcactgcgctcatcgtgctactctccggttccggtaccgcactgttcttcgcgatggttccgctcatggttccgctggccgctgctgctggtatcaatgtgctcgctgtgtccatcccgatgggtctcgctggcaatctgctgcgcgctgtctcgccggtctccgctgtggtgatgatcgtcgccggctccatcaagaagagcccaatcgacattgtgcgccgtaccagtgtgccgatgatcgctggcgtaatcgtcatgttcatcctgtccatggcaatcttcctgccgatgggtgcgtgatgctgatataaccatcacaatccgctaggcgtcagttgtcagcagaacatatcaatcgcgcagacgatttggccccgaatacgtgcaatgcccgggatttgacttcagactccgggcattcgcatacccgcacgattgtgtttccatcgtgattttgctgaaacgtagaacaagcgcagaacatagaagacaggccgaaacaagaaggccgaaaggaaatgcatcatgtcagcatcatgtcttgacttgctcgaccacctgcacggcagtgtgtccgtggtcggatcaatgaatgttgattacacggtcgttactgagcggttgccgaaaccgggagagaccgtcaacggtggcccgctgaccttattgccgggaggcaagtcagcgaatcaggcatcggcggctgcgcgaattggagcgcaggtgcggatgtttggtgcagtcggggaagataccaatgcggattttctgctggagcatttgcgcgatgctggtgtggatacttcgcatatcgctgccgttgcaggtcccagtggcactacggtaattaccgtggacgcgaatggcgagaacaccatcgtatattcggctggttccaatggtgaggtatctgtcgactatgtgcagcagtcatctgatgcattggttgctgctgatgtactgggactgtgtttggaaagtccgatggaaacggtcacggcatgcgctcgcctctgtcatgatgccgggctcaaggtattgctcaacgattcgccattcgttgctgaactacccgctgaacttatcgaggcttcggacattctgctggtcaatgaacatgaaatggcacagctgctggacatcgccgagcctgacgatgacgattgggatggactggactggtctgatgtggcgcggcagatgcatgacttcggttttaatcaggcgataattacgcttggcggggatgggtcggtagtcatcgatggtgatgatatctatcgtattgcgccagttgcggttgaggccatcgacactaccgggtgcggagatgcctttatgggcacggttctggccgggcttgcctcgggtcatgcgttggcggacagtgcgcagttggcctcatacgtttccgcgtacgccgcgactgggttcggcgcgcaagcctcttatggtactgccgctcagattcgtgagcggtttggtgcgaagtaattgctgagtgcagagtcttgcaggccgtgaattggatgcagacctaacacgtccatttagacgctatgcagtgtcgaatgttctcggcgcggattttacgaagtgttgtcagcaaatgcatcaaggcaatggcggcggtctgggcgggactacggccacgcataacagtatcgagtactcgaatgagtcctatgacgcgaaaactcggaccgtgacgatgcatgccgttatcgactggagtgatccgtaccgattcggggattcgaccggcagttttactgcgccggacatcaccgttgtctttgacaagtccgggaaaatccagcgcattgactccacggtcgggggattcccgcctgcccgataattatcggagggcctgaaacatgcacgttctcatcagcgctgcggatcgacgatgctgcaaccatacggcgtcatacccgcatgacgtgagttacactatgtagtaaagttatttactgaaatactgcgtattgttacgtactgaggcgtggaaggctcaactatggtcacgatgaaggaaatcgcacagaaatcaggcttctcgcaggccacggtatcccggctgctcaatggggacccgacattgtctgtcaaagaggagacgcgacgtcgcatcatcgaggtcagcgagcagcttggctacgctaccggatcacgccgtatcgcattgccacgccgtgtggccgtactcgacaacgccacccgcgaggaagaactggcggacgcctatttcgataaactacggtccgtgctcggcgacaatgccagagcccagcacatggaactcacgtcgttttcccatatcgacgatctgattgccgacgccggtgatttcgacggcttcatctccatcggaccgtccgtactctcttcggatagactgttgaagctccatctggtattgccctatggcgtattcatcgacatcaatcctgcgcccagcctgttcgattcggtacaaccggatttaagccaaaccattttggacgcattggatatgttggtgtcctcgggcaaacgacgcatcggctatatcggcggtactggcttcacgatgggtttgcacgaatatccggaagacggccgattaaccgcattccgcaattggaccgagcgtttggggctggatgcggaaggcctgatttacgcgcaaggcgcgttcactgtggacaccgggcgcactctaggggaggaagcggttaacgatcatcgagatgacatgccggatgcgttcatcgtggctgcggactcgattgcagtcggcgtactgcaggcgtttaccgctgcgggagtgctggtgcctcgcgataccagtgtgatcagtatcaataaccaggccatcgcccagtacacttcgccgacattgaccagttacgatatcgaccagaatgagctggccgatactgcgattacgatgcttgccgaggccatctccagtcggcgcacgctgcaccaccataccttcatctccaccaccctagtggtgcgtgacagtttcgtaccagcatgataaagaagctccctctgtgcgataaagaagctccctcgtcagagggagcttctttatcgctgttagaacagttccagattcacgtcgagcgtgtaggcgcgatcggcgggcagctggtactgctcatggacgggcgcgccccatgaatcgtctccgcccacgcccatttgcgcggccaacaggcgcaggaacgtgtgacggaccggcggcaactcgttctggtgggtcgcctcttccagcatgagcgagctgtacggcaacaggctcgccgcgaaatgttcgctgccggcctggctgatacgcatgccgtgtccttgggcgtcaagcacttcggcccaacgcaagtcttcatggttgccggtctcctgcggcaccagatacggtgcattgtcttcggccgcggtgcgctcgaaaatgccgagcttgccgccgtgcagacggtcgtgataggtttcctcgggggcaaggccgtagaagcgcaggttctcgtactgcttgggaagtgtccattccaatccgaatgccggcagcgtcggcgcatcggtggcaccggcatatcgggcggtcagatgtacacgtccgctggcggcatccacctcatagcgcacggcaacttgggtttcgcccggttcggccaacgtatgacgaatgccgccaacgggcaccaacctcgttgacggcattcgtctttccaggacaccgcaatcgcggatgcatgccgtttacgcgttgaatacgtattggtcaaggcggcgcatggcctccttgacgcggctcaagggcaatgcgagattgacgcggatgctgtagggagcctggaacatgctgccgtcctgccaatcgacgcccacatcccagccgcgcttctccaattccgccaaagtcaaaccatgagccttacaccactgctcgcagtcgagcagcagcatgtaggtaccctccggcttggccaaactcactccttggaaatgcttggtgatgtagtcgtaggcgtaatcgacgttgccggtgagcaccgccttcagttcgtcgagccactcatggccttcgggccggtaggcgccgatcagcgcgtgcatggaaagcacgttcatgtcgttgtagtggcatttcgagcttttggccacgatgcggtcccggagtgtgggattgtagatgatgtggtagcttcccaccagtccggcgagattgaaggtcttgctgggcgcgtagaacgccacggtcctgttgcgtgcgtcctcgctgaccgattgggtggggatgtgctggtggttccccagagtcaaatcggaccaaatctcgtcggaaatgaccacgcaatcgttggccttgtacacttccatggccttctcgatttcccaacgttcccacacgcgcccgcaaggattgtgagggctgcagaacacggccacgtggatgtgatgctccttgagcttcctgtccatatcctcgtaatccatgtgccatacgccgcgctcgtccagcgtgagcggactgtggacgatgcggtagccgttgttttcgatgctccgggtgaacccgatgtaggtcgggctgtgcagcagcacgccgtcgccgggggcggcgaacgcggtcagcgcgctgatcacaccgcccaggaccccgttctcgtagccgatcgcctcccgggtcaatccggtaaccccattgcgcgtggattgccagtcgataatggagttgtaatagtcgtcggtgggggagaagtacccgtagacggggtgttgcgcgcgttcgataatggcctgcggaaccgtgggcacggtcgggaaattcatgtccgccacccacatcggaatcacgtcaaatccgtccctcggtgggtcgggagcgaaacctaggtcggttcccaacccatcgaccgcaatcgcatccttgccatgcctgtccataatcgacgtgaaatcgtacgtcattcctcaacaatcctttctccggcccatacgggagccgcccctgaaccagatgtgcaatatcgccggtaaaggagcctagcgtgtttgctgacaatggtgcacgcgatgaatacaaaaatgagaaaaaatgatcattcctgatgaacattctcgttgatttgaccgcgtggcgtgttacgatatgcaccgttgtgaggcagtgatccgttatcagcggggagtcttcggaagaacggcggcaatcgcccagtagaaccgacgggatcggcccgagacagccgaacacaagcggtcgcgcaggctcgcggctccgagtgcaacagttcggagcggcgcaaccggtgcgataagcgaggtggtaccgcggtgcggagcgcataccagcgcccgtcatcgtcctcgtaggcaggaacggcagacagggctgttccgggcggaacacagtcagttccggctgcgaggcgattgacgcgatcggccccacggttcggtacgtgacattcgtgaacccagccggcacacgtcggcgcccggcaatcgccatcaatgacgctcctgtaggaccagtgcacagtactaacaggagatttacggtgagcgaaaacgtatatcccaaggcgaacgagggcggcgagaccgcgcacgtcgcgccgaaccccagcttccccgacatggaggagaccgttctcgactactgggacaaggacgacaccttccagaagtccgttgaacgcaacccttccggcgaccacagccagaacgaattcgtgttcttcgatggcccgccttttgcgaacggtctgccgcactacggccacctgctgaccggctacgccaaggacgtgatcccgcgctaccagaccatgaagggccgcaaggtcaaccgcgtgttcggctgggacacccacggcctgcccgccgagcttgaggcgcagaaggaactcggcatcgactcggtcgaccagatcgagaagatgggcatcgacaagttcaacgacgcctgccgcgcttccgtgctgaagtacaccaacgaatggcagaactacgtgcatcgtcaggcccgttgggtggacttcgagcacggctacaagaccctgaacatcccgtacatggaatccgtgatgtgggccttcaagcagctctacgacaagggcctggcctaccagggctaccgcgtgctgccgtactgcccgaaggaccgcacgccgttgagtgcgcacgagctgcgcatggacgccgacgtgtaccaggaccgccaggacaccaccgtgtccgtggccgtgaagatgcgcgatgaggacgacgcctacgccgtcttctggaccaccaccccgtggaccgtgcccaccaacttcgccatcgtggtcggcggcgacatcgactacgtcgaggtccgcccgaccgaaggcaagttcgctggcaagaagttctacctcggcaaggatttgctgccgcactatgagaaggaactcggcgagaactacgaggtcgtgcgcgagctcaagggctccgagctggaaggccgccgctactacccggtcttcccgtacttcgcgggtgacgaggccgaatccgaaggccacgtgcctggcccgaacggctacacgatcttcaccgccgactacgtcgacaccgttgaaggtaccggtctggttcaccaggctccctatggtgaagacgatatgaacacgctgaacgctaagggcatcaagagcaccgacgtgctcgacgatggctgccgcttcaccgcgcagtgccccgactacgagggtgatttcgtgttcgacgccaacctgccgatcctgcgcaacctgcgcgccggcgatggcccgctcgccgagattccggaagagcgccgcgcgatcctcttccaggagaagagctacgtgcactcctacccgcactgctggcgttgcgccaccccgctgatctacaagccggtctcctcctggttcgtgtccgtgaccaagattaagccgcgtctactggaattgaaccagcaaatcaactggatccctggcaacgtcaaggacggccagttcggcaagtggctcgccaacgcgcgcgactggtccatctcccgcaaccgcttctggggttccccgattccggtgtgggtgagtgacgatccgaagtacccgcgtgtggacgtttacggttctctcgaagagctcaaggccgacttcggtgactacccgcgcgacaaggacggcaacatcaacatgcaccgtccgtggatcgacaacctggtccgcgtcaacccggacgacccgaccggcaagtcgcacatgcaccgtatttccgatgtgctcgattgctggttcgagtccggttccatgtcgttcgcgcagttccactacccgttcgagaacaaggagaagttcgagcagcacttcccggccgactatatcgtggaatacatcggccagacccgcggctggttctacctgctgcacgtcatggcgaccgccctgttcgaccgcccagcgttcaagaacgtgatctgccacggcatcgtgctcggctccgacggccagaagatgtctaagcacttgcgcaactatccggacgtgaacggcgtgtttgacaagtacggttccgacgccatgcgctggttccttatgtcttcgccgattctgcgcggcggcaacctgatcgtcaccgccgatggcatccgcgacaccgtgcgccaggtcatgttgccggtgtggagctcctactacttcttcaccttgtacgccaacgcggccaacggcggggccggattcgacgcccgccagctgcgcgcggacgaggtcgccggtctgccggagatggaccgctacctgctggcccgtacccgccgcctggtgctggccgccgagaagtcgctgaacgagttcgcgatttccgacgcctgcgatgcggtctccgacttcatcgacgtgctcaccaactggtacatccgcaacacccgtgaccgcttctggaacgaggatgcgtccgcgttcaacacgctgtacaccgtgcttgaagcgttcatgcgtgtgcttgcgccgctggccccgatggaagccgagtccgtgtggcgcggcctgaccggtggcgagtccgtgcacctggccgaatggccgttcgtggtggacgagaagaccggtgccgataccgagctcggccgcgtgctggtcgacgatccggccttggtggacgcgatggagaaggtgcgtgaggtcgtctccggcaccctgtccctgcgtaaggccgccaagatccgcgtgcgccagcccctttccaagctcaccgtggtggccgggaacgtggaggccgtcaaggcgtacgacgatctgctgaaggccgagctcaacatcaagaacatcgagttctcgacgctgcaggatgccgccgcccacggtctgaagatcgtgcacgagctgcgtgtgaatgcccgtgcggcgggtccgcgcctcggcaagcaggtgcagttcgccatcaaggcgtccaagtccggcgactggcatgtcgatgctgcgtccggtgcgccggtggtctccacgccgtccggcgaccttgcgctggtcgaaggcgagtacgagctgatcaaccgcgtggaggaggagaacgccaccgaggccgccgcttcggtctccgccgctctgccgaccggtggcttcgtgatcctcgacaccgcgctggatgccgatttgctggccgaaggctacgcccgcgacgtgattcgttctgtgcaggacgcacgtaaggctgctgatctggacatcgcggaccgtatctcgctggtgctgaccgtgccggctgtcgatgtggccaaggtcgagcagttccgagacctgattgcccacgagacgctggctacctccttcgaggtgaaggagggcgccgagctgggcgtggaggttgttaaggcgtgaggctgatgctgagctaaggctcttcaattggtctgaaacaattgcgggcatccgatatacagtgattcaatgaacactgcatatcggatgcccgcatttttcgcgcgtttatgcgtcttttcgacgcatccctattttgaaaaaaactaacttattcaagtttttcaaaatagaaggggaacggttctacctctcatggcttgtgaggtgtcgcttcaatcgttgttagctacacttatcgcgataagtgtagctaacaacggaaatggtagtgcccaagttgccggtagatgtattgcgtatgttcggccagccactcgtatcccgtctgccctgcttcatctagtgccgatgcccgcttgggaacagcgtaagttgggcgaattgtttgattacgaacagcctcagccatatattgtgaggggaactgagtatgacgattccttccccacaccagttttgactgccggtcaaagtttcgttctgggatacacaaatgagaagcaggggattaagatggcgagccctgagcatcccgttatcatttttgatgattttacgacttcgagccattttgttgatttcccctttaaagtcaagagttctgctataaaactgctgactcttcgcgacaaaaacgaagacattcattttgcataccaggtactgcaaaatattgcctacacgcctgtgagccatgagaggcactggatttctaaattcgcgactttcgcaactctcatgccggagtgtaaatccgagatgcaggcaatcgggcatttcatgtcaaaccttgatggcctcatcacccttcatcagcgtaagcgtctgtggtttgctaaataagggtggatagggctctcatcacgatgtcaacgtctttgttctccaattcacggatgacatgcagatatgtttcctgcgttgtgttcatgcttgcatgccccagtctcttggacacgctcgcaattgaaacgccagcaaacagcagcaatgaggcatgggtatgtctcaagccgtgaatcgagatcacgggtactccggcttgtttgcaatgccgggccagaataccgtttgcggtcgagttgtacaccttaccgttcacgaagataggcttgtcgtcaggcaagttcttcagcaggacggacaattgcatgatgagttgccaatcaagttgtactttacgcaccgaagaagcattttttgttggaacaaagccacctccgttcttgtaattccaagtcttattgacagacaaagtctggtggacgaaatcaaagtcatcaggagtaagacccaatgcttcggagaaacgtaaaccggtttttgccaccagcaatatcagccagtcccagttaggtatcgggtcaagcttcaagtcagcaaggacagcatgaagttcgaattggttaagatatttcgtcttcttttgtctcggctgcttccctttgatgattgcttttcgagtgggatctctttgaattaggccctcatcaacagcatcaagaatggcccctttcagttggtgatgaaaatccatcgttgtttgatgttcatgatgttcggcgtatccattgatgagtttctgataactcacacgatcgaactcagaaagcttaagatcagggataagctttctcagccacgcctgtgtgagtttgtatttcttcatcgtcacctcccgaatcgcgccttccttgtagacgtcgacccattgcgagtagtaatcgcagaatgacatttcttcgtttattgtgtttatgaccacacggggctcctttgccgaatagatagacgcttacgctgatgaagggtgatgaggtcgtcaaggttgctgaagaaagagccaatttgtcgctgctcatctaaacttggttgaggaatacctagctctttgatgattgcgcctgagaggtttccctgcccaccttgaagaaaggtttcggttattgatttcttctgtctacggagccagtaagctatgaaacgatttgctgccatatcagatgcatccatggcaagaatcgcctggttaattgccccttttatcttcgaaatagcgacttctccgctggttgctccatacatggcatagagaaccattcctttatcaacaagctttgctgatgagttatttaaacccgcaaccgtaagtgacaattcggttgaatcgcaatcgatttcagcagatcggataaaaggaatttcgcctccatagtaagcagaattgccagcgctgggagtgcctcctgaataagtcagcgccagctctcccaacttacgctgttcccaagcggaggcgtatttccgtgatgtttgccgtatcattgataaacgactgtaacggaacgaaggcggacaatgacaattcccagatatgacgagtttttcgttccgatgcttcgcattctctctgatggcaagattcatgcatctggtgagatgctaacgttacttgctgatgagtttgcagtgacagaaggagaacgcagccgtctgctacctagcggccgttcgcgtgtcctcaatggccgcattagttgggctagaacgtaccttaagaaagccggactcatagaaagtcccaaacgtggtacatatcgcataacgagacccggcaaagaggcccttgcttcgggtgcgcagatagataatgattatctggaacgttatgagtcattccggtctttcaagaatctgaatggtgattcttcgacgcatacgacggtcgatggcggcctggagaagaaaagcgaagcttattcgtccgaggaaactccagatgaggcacttgaccgtgcattctcatcaatcaacatgcggcttgccgatgacttgctctcagaggtgctcaagctctctccgattgcgtttgaacggtttgttcttgatctgatggcaaaaatggggtatggagctttcgactccgcaagccagatgacgccaatctcgggggacgaaggcatagatggaatcatcatggaagacaagcttggttttgatctgatttatgttcaggccaaacgttatgccgaagataaatccgttggcagaccagatattcaagcattcgtaggtgctattactgggcgcggaggcaaagggctgtttgtcaccactgcaagattcacggaaaaggcgattacctatgcgaagaggcagcacatcattcttattgatgggcataagcttgcgcaactgatgattgaacatggattcggtgtcagcacgcggaagatttacgaaatcaaagccgtggacagtgacgttttcaatgaatacgttgatgaagagtaatgaaagagcttagggcacaaggagcatatgaatgaataagcagcagcttgccgccaaaatctgggaatctgccaacaagatgcgttccaagatcgaggcgaatgaatacaaagactatatccttggctttatcttctataagttcctttcagagacggaagttgcgcatcttcgtgctgaagactggggagatgaagatctcaagggcttggatgagaatgatgccgagaccgtgcagtatgtacgtgatctgtgcggctactttatctcctacgacaacctgttctccacatggattgccagccaaagcgatttcaccatcgccgacgtacgtgatgcgctttccgcttttgaacgcaacatcgatccagcccgcaagcgtgtgttcgccggcatcttcgacacgttgcagactggtctatccaagctcggtaccgatgagaaaagccgtagcaaggccgctcgcgacctcatctacctcatcaaggacattccgatggacagccggcaggattacgataccctcggcttcatttacgaatatctgattagcaacttcgcttccaatgcgggtaagaaggccggtgagttctacacgccgagcgaagtttctcagctcatgagcgaaatagtggcctggcatcttgctggtcgtgaagaaatcaacatttatgaccccacaagtggctcaggctcgttgttgattcatattggtcaagctgtggcccgccgcaatggcaatccgaatgacatcaaatattatgcgcaggaactcaaggagaatacctacaacctcacacgcatgaacctcgtcatgcgcggtatactgccggacaatatcgtgacccgcaacggtgacacattaaagagcgactggccgtggttcgataccgacgagaccaaggacgaaacctatgagccgctgtttgtagatgccgtggtttcgaatcctccttactcccagaactgggagccgccggaaccgggtgaagatatccgcttcgaatatggcatcgctcccaagtccaaggctgattatgccttcttgctgcacgatctctaccatctgcgcgacgacggcattatgaccatcgtgttgccgcacggcgtgctgttccgtggtggtgaagagggcactattcgccggaatctagtggagaaccaccatattcaggccatcatcggactgccagcgaacatcttctttggcacgggcattcccactatcgtgatggtgctgcgcaagcaccgcaacgatgaccatgtgcttgttgtggatgcctccaagtatttcgctaaggacggtaagaacaacaagctgcgtgcgagcgatatcaaacgcatcgtggatacggtgtcggagaatcgtgatgtcgataagttcagtcgtttggtcagccttgacgagattcggcagaacgattacaacctcaatattccccgatatgtggattcctctgaaagcgccgaaagttgggacgtgtattccaccatgtttggtggcattcccaagcaggatatcgatgcgctcggtaagtattggaacgtgttcccgggattgcgccaacgtctctttgctgaggagaacggccattcggccaagctcgccgtgcaagacgttcgtgaggcggtgaatgccgactcagatgtgaaggcatatatccagcgttatcgtgaggcgttcatcgattatccggcttatatacgcggtgaattggtgggtaatgccgccaatgtgagcattgccgccgaagaggagactctggcaaatgatctgctgcgtcgtttggctggtatccctctcgtagacgcctatgcggcgtatcaggtgcttgacgatagttggcaaaagactatttccatcgaccttgaaaccatacaggacgagggacatgacgccgttcgcaaagtcgacgccaacatggtcgtcaagaagaaagacggtaaggatgtcgaagtgccggacggctgggtcgggcatattctgccgttcgatctcgtacaggggaaattacttaactctgatcttgcggaaattgccacatttgaatctcggctgagtgagattggcggcgaaatcgctgacattcttgaaaatctggatgaggatgacaagagttcgactgatgccgtcagcgaggatggagattctttcgttgccgctgaattgaagaaagcagtgaaatcgattgggaagaatcccgagactgactttgaccgtgctcttgtgagtgcacagcggttgtttgatgaagagcgtgaagtcaaaaagaacgttaagaatctccgttcagcgcttgatgaaaagacccggaccgttattgaaggactgagcgatgaacatgctgatgacttgcttgttgccaagtgggtggaaccattgcagcgcaagcttgaggagctccctcagacggctgttgatgagttgattgcagcggtgaatgcgctgaacgacaagtattcgaccacatactctgatgtgtgcgaacagatcgaacagactgaggcagaacttggcaatatgcttggtcaactaaccggcaatgagttcgacatggctggtattgccgagctgaagaccctgttgggaggcgaatgatgactgaacaggcgaaagtacccgcgattcgtttcgctggttttactgacccttgggaacagcgtaagttgggagagctggcgctgacttattcaggaggcactcccagcgctggcaattctgcttactatggaggcgaaattccttttatccgatctgctgaaatcgattgcgattcaaccgaattgtcacttacggttgcgggtttaaataactcatcagcaaagcttgttgataaaggaatggttctctatgccatgtatggagcaaccagcggagaagtcgctatttcgaagataaaaggggcaattaaccaggcgattcttgccatggatgcatctgatatggcagcaaatcgtttcatagcttactggctccgtagacagaagaaatcaataaccgaaacctttcttcaaggtgggcagggaaacctctcaggcgcaatcatcaaagagctaggtattcctcaaccaagtttagatgagcagcgacaaattggctctttcttcagcaaccttgacgacctcatcacccttcatcagcgtaagtatgacaagcttgtcatctttaaaaaatcgatgcttgaaaaaatgttcccgaaagatggtgagtctgtacccgaaattcgctttgctggttttactgacccttgggaacagcgtaagttagagaacctggcttcctttggtggcggtcatactccttctatggctgatgccagtaattatgttgatggaaaaatcttgtgggttacttcgcaagatgtgaagcaacattatattgaaaacaccacgacgatgattagcgaaaagggtgcagcaacattgacgctttacccctcagactcgatagtcatagtcgctcgaagcggaatacttaggcatacgattcccgttgcaaagctgcggaaaccagccaccgtcaaccaagatattaaagttattcagactgtcgattcttgtgattcctcatggcttttacagtatttcattgcctctaacaagacgctgcttcgcgaatatggcaagacgggaaccaccgttgagagtatcgactttgcaaagatgaaatcgacggctctgatggtgccgtacattgaagaacagcaggccatcggctccttcttttcccgtcttgacaacctcatcacccttcatcagcgtaagttggaattgctgcagaatatcaagaaatccttgcttgacaagatgtttgtgtgaagggaggtagagcaatggagacattcgatatcgtgaagctcgcctcatatcgcgagaataaccggattgaagcgaaagcagcgaaaggcggtctcccacgcagcatgtgggagacctattccgccttcgccaacacctatggcggtgtcatcctgcttggtgtcaaagaacgcgaagacggcacatttgaaacagtcgggctcgcaccagtggaagcggaacatcttcgccaggacttttggaacacggtcagcaaccggtccaaggtgagcgccgtgctgcccatcgaatcggaagttgaagtgctcgaagcggatggtgggatggtgctggctattcacgttccgcgcgctccgcgtgacgaacgccccgtgtatatcaataatgatctcttcgggggaacctaccgtcggcgtggtgagggcgactaccgttgcacgcggcaggagatctcagcaatgctccgggatcagggagctgagacgatggattccaaggtgctggacgatctcactgttgccgacttcaatacagacacagtgcgggcatatcgcaatcgtttccgtacggtacgtcagggcagttcttggaccgatctcgatgacgagcgttttctgcgtgctgttggcgcggcaatggtgagccgagaagacggtaagcttcatcctacgttcggcggtctgcttatgttcggcaacgactatgacatcgtgcgcgaatgtccgcattatttccttgattatcaggagactctagatccgacgattcgttggactgatcgtgtccattccggcgatggcatgtggtcaggcaacctctttgatttctttttccgcgtgaatctcaaacttgccgagtctctgaagacccctttcaaacttaatggcatcttccgcgttgatgacactcccatgcataaggcaattcgcgaggcattggccaactgtttgttcaacgctgattactatggcgtgcgtggtgtggtggtcagacgcgcacccgatagattggtgttcgaaaatccgggcgatatccgaacgggcgttgagcagatgcgtcttggcggggtgtccgatccgcgcaacggtcttgtcatgaagatgttcagcctaatcgatgtgggcgagcgagctggtacgggtgttcccgatgtgtttgccacatgggcgaatgcaggacttcctgaaccgcagattgaggagagcttcggcgaggctgatcgtacggtgctcacgcttatgttggagccggatgccaagctcgatcaaaatgagcatgtattcatccgtggtgagcagataactgacaataatgagcagttaaatggtttgaatgagcagataactgacaataatgagcagttaaatggtttgaatgagcagataaccgagagacagcgaattgttctacgttttgtagaaaagagccccagcgcgacatatgacgacatggcacgtgccgcgggagtctcatcagcgactgtgcgaagggatgctgaaatactcattgggtgtggattgcttaagcgcgtcggctcgcgaaaggcaggacactgggaagttcggggagagaagaatcatgatattcgatagcgaatcggtgtttgaggaaaacgtcatcaccgtgcttaagcagcatggatggaaggacggtgtcctgcgctatccaactgagcgggatttgctcgacaattggaaagacatactgtaccgcaacaacaacgacatagacaggcttggcaaatacccgctgacggacggggaaatgacccagataatcgagcagatcgagaccctgcgaacgccgctcgcgctcaattcgttcgtcaacgggcgtaccgtgtctatcacgcgtgacaacaaagaagatgtggcgcatttcggcaaggaagtcagtctctacatctatgaccgcaaggaaatcgcgggcggcaaaagcacttatcagatcgctcagcaaccggtctatccagccaagaacaagatgttgaactcgcggcgcggcgacctcgtgcttctcatcaatggcatgccattgatccatatcgagctcaagaaaagtggcataccggtcagccaagcaaccaatcagatcgagaaatatgcgcacgaaggtgtgttcaccggcctgttccgtctagtacagattattgtggccatgaaccccgatgacgccgtctacttcgctaatccgggtgtagacaaattcaatccaagctattacttccattgggctgactacaacaatgagcctatctgcggcgggcaaaaccctggcaaagacgaatggaagctgttcatcggaggcacctccggtaccgcaggcctgctgtccattcccatggcgcatcagctcatcggcttctacaccatcgctgattcagcggatggatgccttaaggtgctgcgtagttatcagtacatcgcggcaaacgccatctccgatgtggtgaggaaatgtgattgggaacagcggccagctaccccaggacgacccggcggctatgtatggcacaccaccggttccgggaaaaccatgaccagcttcaaatcggcgcaactcatcgccgattcgcatgacgccgataaagtcgtgttcctcatggaccgcatcgagctgggtactcaatcgttgaaggaataccgcagctttgccgacagcgagacggaagtgcaaggcaccgagaacaccggtgttttgcgggacaaactcaacagcaccaatgtcaacgacactctgatcgtcacctcaatccagaagatgagcaacgtgaaaacaggggagcgaggcgtcacacagacctggctggatcagctagctgaacgacgtatcgtctttattgtggacgaatgccatcgttccacattcggcgacatgttgcagaatatccgtcgctctttcccaaacgcgctgttcttcggatttaccggtacgccaattctggacgaaaaccagaagaagaattccaccactgccatggtattcggccgttgcttgcaccggtacagcatcgccgacggcattcgtgaccataatgtactcggattcgacccgtacatggtgaccacgtacaaggattctgaagtcagacgtgccgtggctctcgacaaggcgaaggtggagagtacggaagatgcgctcgccgacccggtcaaggccaaagtattccagcattacatggataagtctgagatccccatgggtccgatggttgatggcgctggaaactgtattagcggcatcgaggatttccttggacgagaccaatatggcatcgactccccgcatccgaacatggtggtctcggacattctcgaacagttcccggtgctcagccatgcgggcaaattccatgcgatgctcgccactagctccattcctgaagctgtcaactattatcacttgttcaagcagcaagcacctaagttgcatgtaacggcgttgttcgatcccaacatcgacaacaacgaaggagcaacggacaaagaagatgcgctgactgaaatcatcaccgattacaatgaggcgttcggcaaagagttcatcatccccacatggccggcgatgaagaaagatatttcgtcgcgactatcgcataagagtccgtacggcggcatagcaacaaaccgcagtcagcagctcgatttgctcattgtcgtggaccagatgcttaccggatttgactcaaaatgggtgaatacgttgtatctcgacaagattatcgactacgaaagcatcatccaggcattcagtcgcacgaatcgtctgttcggaccggacaagccgttcggtgtcattcgttactaccgcaaaccgcacaccatgcatggcttcattgaagcagcggtgaaactgtattcgggcgatcggccgcttgacctgttcgtgcagaaattgccggcgaacgtaaaatccatggatacgcggtaccgggaaattcttgacgtgttctcggataacggggaatcggaccttatgcagttgccggaatcggtggaggctaggcgcaagtttgccaaggagttcgtggagctgaaccggtaccttgaagctgcgaaagtgcagggctttgactggagtaccccagaatacaaggtcgatagtacggatactgacgatgcgaatgaggacaatgatgagcatgacgagtctgaagtagtgcgtcctcaaatcgacgaacgtacatacctcattcttgcgcaacgctataaagaactgttctatggcaatagcagctgcggtggtgattcagatgatggcgtaaaaaataatcccgaagcgccatatgaattggatggctatcttaccgaaatcaataccggactcatcgataccgattacatgaatgccaacttcaataaatggctgaaggcgctcaaggagaatagcccggaattggcggagatgtctgcgcagctacaccgttcctttgccgcgctctcgcgggacgaacaacgactcgccgaactgttcctgcatgacgtggagcgtggcgacgtggaggttgaagccggcattacgctacgtgattacatcacgcgctatgctgcacgcgagaagaatgagcaagtcgacaaactggtcgatcgattgggtgtcaacagatcggtggtcgaggaattccttgccaaacgtatagacgaggcgaacatcaacgagttcggacgtttcgatgcactgcgttcctcgcttgacgtgcaacgggcaaaagccttctttgagcagcatgatcacaaggcattgccggtgttcaaggtgcgtatgcgcgccaccaatatgttgaagcgtttcgtactcatgggcggattcgacatcgatgataccgacaatacggatggacaaagcgagacgaagaacgagcactagactcatatacaagaaggggtgtttccgctggcatcagcggaaacaccccttcttggactagtcgatatcactccgcagcaatcgcggccttgagctcctcgaccttgtcggtcttttcccacgggaactcaacgtcggtacgtccgaagtggccgtacgcggcggtcttcaagtagatcgggcgcttcaggtcgagctcgtcgatgatggcggcggggcgcaggtcgaagaccttgcgtacggcggcggcgatctggccgcgcgtcacgccttgctcggtgccgaaggtctccacgttgacggataccgggtcggcaacaccaatagcgtaggcgatttggatctcgaccttgtgggccaggccggcagccacgatgttcttcgcaacccaacgggtggcgtacgcggcggaacgatcgaccttggacgggtccttgccggagaacgcgccaccgccgtggtgggcagcgccaccgtaggtgtcgacgatgatcttgcggccggtcagaccggcgtcggccgccgggccgcccaggatgaacgaaccagtcgggttgaccagctgacggtagttgtcatgcggcaccttggaacccagcacctcatcaagcaccgggtcaatcacgtgcttcttcagctcaacagcaagccaatcttgcgtaacctcaggatcatgctgggtggagatcagcacagtgtccagacgaacaggcttatcgtcatcgtcatactcaatggttacctgggtcttgccgtccgggcgcaggtgcggcacttcgccagacttgcggacctcggtcagatggaaggcgaggcgatgtgccaaatagatcggaagcggcatcagcgtcggagtctcgtcggtggcgtagccgaacatcacgccctgatcgccggcaccctgtgcctcgtaacgttcttcgcggctggcggcggtctcctgatcgccagtcagacgggcaacgccctggttgatttcggcgctttgctcggtgatggccaccacaacgccgcaggaatcggcgtcaaggccgacttcggaggaggtgtagccgatgttgcgcagggtctcgcggaccttggactgcacgtcgcaatatccctcagacgtgacttcgccgaagaccaggaacacgccggtggcggcggaggtctccacggccacatggctggacgaatcttgggccagcaaatcatcaagaatggcgtcggagatttgatcgcagaccttgtcagggtggccttcggtcacggattcggcggaaataagccgatgttcttctgtcatatcatccctttcttcaggacttatcgccccgcgggatgcgaggcacaatgatacggtgtcaatttttacttgtcactgtggaagcgggcataactaaaggctcgtgccaaccagcgcggtggcgcgagccttacgtcttattcgctcccgatgttgagttatagccgattgcgataactcaggcaagcgtgtcgctcaaaatcagttgtgagagaactctcacaccatcattcggcgacgaactgtccaaacaatccaaacgaattgtcggaatcgatcagttgccctcgttggcgtcgtcctcgcccaaggtctcctcaagcaggccctcgtcgatttcgcggaaggcgatggacaggggcttctcattgttctggtattcgaccagcgggccgatgttctgcagcaggccctcgttgagctgcgtgaagtaggagttgatctggcgtgcgcgcttggcggcgaaaatggccagcgcgtacttggaatcggcgtgcttcatcaggtcgtcgatcggcgggttcgcaagaccgtcgggtgtcgggtcagtaccaaaagccattgttcttatctccagacattggaaaatctatctcaaccgaagcaagtgtagccgtttggggggacttctgtcagccctataccggactctcgccagaggaatgtattccaaaaaaaaactgtgagaaacgttacgtttttgaaaattccactattcgactcttgacaaatggcgtgtccctcgcaaaggcttgaatagaaccatgactgaaatgcgatctgcaaaaattatgtcagggcgcgtctttgcaggcgcccgagccctctaccgtgctgcgggcgtcagcggagacgacatgggcaagaagcccatcatcgccatcgccaactccttcgatgagttcctgcctggccacgttcatctgaacaaggtcggacgcatcgtttccgaggccatccgggaagccggcggcattccgcgcgagttcaacacgatggccgtggacgacggcatcgccatgggccacactggcatgctctactccctgccttcccgcgacatcatcgccgacaccgtcgaatatcagtgcaacgcgcactgcgccgacgccctcatctgcatcccgaactgcgacaaggtcgtgccgggcatgctgatggcagccctgcgcctcaacattccgaccgtgttcgtctccggtggcccgatggaggccggcaccacggtgctcgccgacggcacagtcaagagcaccgaccttatcgacgtgatgtacgccaccgccgacgacaacgtctccgatgaggaactgctcaattacgagaagaccgtctgcccgacctgcggctcctgcgccggcatgttcaccgccaactcgatgaactgcctgaccgaggccatcggcctggccctgcccggcaacggcaccatcctcgcctcccactcctaccgcaaggacctgttcaagcgtgccgccaagcaagtcgtcaagatcgctcaccagtactacgacgattccgacgattccgtgctgccgcgctccatcgccaccaaggaagccttcgagaacgccatgaccatggatgtggccatgggcggttccaccaacaccgtgctgcacatcctcgccatggcccagtccgccgacgtggacttcaccctggacgacatcgagcgtatttcccacaccgtgccgtgcatctgcaaggcctcgccgtccggcaagtgggagatttccgacgtgcatcgcgccggcggcatcaccggcatcctcggcgagctcgaccgcgccggcaagctgcacaccaacgtgcattccatcgactacccgacgctggaagccaagctggccgattgggacatcatgcgcccgacctgcaccgaggaagcccagcagatgtacaaggccgctcctggccacatcatctccccggagccgtggacgcacaccaccctgttcgactcgctcgaccgcgaccgcaccaacggcgccatccacgacatcaaccacccggagattcacgaaggcggcctcgccgtgctgcgcggcaacctggcccccgacggctgcgtggtcaagaccgccggtgttccgccggagatctggaagttccgtggaccggctctggtggtcgactcccaggagcaggccatcgaggtcattctgaacgacaccctgaagcctggcatggcgcttgtgattcgttacgagggtccgaagggcggcccgggtatgcaggaaatgctgtacccgacctccttcgtcaagggcaagggcatcggcaaacaggtcgccatgctcaccgacggtcgctactccggcggttcctccggtctggccatcggccacatggcgcctgaggctgccaacaagggcccggtggcgctcatcaagaacggcgacatcatcgatatcgatatcgaagcccgttccgtgaacgtcgaactgactgacgagcagctggacgagcgtcgtcgcgagcttgaggctggcgacggctacgtggctcaccgcaaccgccacgtctcccaggcgctgaaggcgtacgccgccttcgcccgctcggccgacaagggtgcgacgcgtgacccggagctgatcaacaagctctccggtctcgactgatcgccgattgcatagctgaaaagcccggtatcttcctcgcgaagatgccgggctttttgctgtgcttccgggcgggagcgatattgcttgttatcgcacgcaggcggcgggggagaggcgcgcgcctcgggcccagtcggcggcgcgcatggccttcttgccctgcgccttgacttgggtgagttccagcggcgtgctgccggtaccaacccacacgttcttcttgcccaccttcagctcgccgggctgaagctcggccggagtgttgggattggactggtcggccggttgcgcggcgagaatatgcagggtgaggggtttggcggccggctcgtcattatcggcgattggcccctccgcaaacagttcggtccatgccccaggatgtggcgtgcaggcgcgaacctgacggtcgatggcctcggcctcgtccgtccagctgatacgagcatcttccaccgtgattttgtgcgcgtattccaggccttcggccggttgcgcggtgaatgtggcagtgccttcacccacggcggccaaggcatccacatacatgggtgcgccttcctcggccagacggtcgaggagttcgccggaggtctcacggccggtcagctcgatggtcagggaagcgacgatcgggccatcgtccaaaccctcgccgaccttgaacacgtcggcgccggtggtcgggtcgcccgcccaaatcgcacgctgggcgggagcggcgccacgccacttcggcaagttggagaaatgcaggttgtaccagcccatgggcaccgcatcaagcacattcttgggcaggatattgccataggcgatgaccgcggcgatatccgcatgcaggttgttcagcgcttccatgaattcgggggagcggggtttgagatcgatgacgggcaacccgagctccagagccgtcgccttgaccgggctgggcgtgagcttgcggccgcggccggtaggcgcgtcggggcgggtgatgacgccgaccacatcaaaacgtggatcggcggcaaaggccttgagcgagggcaccgctacatcgggggtgccggcgaacacgagtttgagcatggtcctccttaaaacgtcgatgctcactgcacggccggaatgttcacgccattggcgatgagcagttcacgcagcttgaccggatcctggaaacgcacgccacggatgccggccgcattcgaaccgacgatgttcatggccttgtcgtcgatgaacaacgcgccatcggccttgataccgaactgattgagcgcggcctcgtagatttccttgtgcggcttgcgcagcttgacgaaaccggagacgagcttgccatcaagctgctgcagaatatcgcactgttcctcggccacgtggaaaaggctggattcccagttgctcaggccccacacgccaataccggcggccttcaggtcattgaccagcacgcgtgcgcccggcacgatgccggtcagggagtcgcggaagttcttgatgtagtagtcgaggatgtccgcccacttatcgcccctgtcacggcgtatgatggcgatggcctcgtcggtgctggtgccgccgtccatcaggtcgttgacatcgtagaagccggagatgtcgttgtcgaggaattcgtcgatggtcttctggctgtagcgggggatgagcacggccgctggatcccagtaaatcagcacgttgccgaaatcgaagatcacgtcggtgatcggcttgccggcgttcgcggcggcttcgccgtccgcgaccagcacgtcgtaatccatatccggctctccgggccaacccttcatggtgtcctccttatagcgatgttcgttctgtaatcatcgtttcacgtgttggagacgattagatcagatctttgggatctactcggaagcgaagctcgccgggcttgcgggacgctacatgacgagcggtttcccggtgcagtcgggccgccagttcggctcgccgactctgtggcacacggattactgccttcacccggtcggccgtggcttcgagctccctggcatcaaccgtgtccggttgcgcgatcggcaccggtcccaacatgccgggcagctcgccgcaggccgtccaatcgccgcccagggcgccgatacgctgcatcagcgtcatcaccgcatcacggcggccccacacgcaggcggcggccacggccggcggcataccggtctccacacgctcctcgagatccttggctgcaagaatcctcgaatcccagagcatcagcgattgggcgatggccgggtcggtctcgccgagaatcaacgcctggccgccacgggaacgcggcgcgcacaacgacatcgcacgcatccacgcggtcaacgtatccaaccgagcatccacgcccaacgcatacaagctggtccaagcgtcgagcacggccacggcacgatactcatggccagccgatccctgctcggcactgaccggacgcacgcgcggttcgaaaccgggagtggcgatgacaatcatcggctggcaagctacatcgcgcaccagaccctgcgtcttgctggacaaaactactggcacgccacggaacaatccagccagctccgccgcagtgccggcagcccccacacgcaccacgcgcatacgttcatgcccacagcccgggcacttccagttgatggcggcagccccacaccagcggcatcgcggtgtagaatcccggcggtcggccggcagttgcaacggtccggaacacttggcacaacgcacctgacgatggcatttcgcacagctcaaggtctcactgacattgtcttgcggaatggatagcagcacggggccactttccaaagccttagatagcacgcggacggccgtatgcggcacgcgcgccccgatggacgggtcagcgagacgcgcaagctcatcgcgattgagccaacgcacccaaggcgtcgcatccttcagtggcgaggcaagcggatgaatcgcggtggaatagccgctcaccggagtttccaccgtacctggaccggtgttttcccactgactttgcggagtgcgcgcattggccatggccacgaatacgccgccatgggacttggcgcgtaaccgcatcacgccgcgagcctgtggatacggcatcataccgtccatgttctgataggcggcatcctccagaatggcgaacagtgccgggccttcaaccggcgcatacatcaccgcgcgggtgccgatcaccaccttcacctggcccaacgccacagccagatacgtgcggtaccggtcggccgcaggcatggtcttcgcattgagcacggccacatcgcccatccatccgccggttggaaccggggcaaatggtttgagtccataattgcgtagcatatgcatcaggtcttcgacctcgcgcatggtgggcaattcaaccacggcagccttaccggcactcaacgcagtggccaccatccatgccatgttccgttgccactcctgtgcaccgggcaacgaatcaaacacaaaagattggaaacgttgaccggtaagcgcgtcatgaagcacattgacatcggcgtaattggcggtcagacgacgatacccctgcgcagctccctccgaaacggtgctagcaacggcaaaggtagagccagcaggtttggtcccatcgggattggtgccacgcccggcaaaaccgccttgcgtattatccggcaatgagccgccgaccggccgacggaacgacgcggccaaccgctgctcggtctccaccttggccacgcgcggtggcacggcgaaacgcagaatattggcccgtgtgccgccataggctttggcaaccagaccgatatcctcgcgcatcgaagcgggaaccagtacatcggggcttagcactcgctcgatatagcgaatcgaagagcgcggcgtatcactggtatcggtgcgtgcccaaatcacaccgctgaccctctgaccgccaaaccgcacgcgcaccagcacacccggttgtgcggcctcgctgtctttttcatcaatgaagtaatcgaatgtctgaccgaggtggagcgcctgcacatccagcacgacttgcgctatgggatgctgctcggccggcgtatgctccgcaggcgcacgtttacgacgcttgcggggagccagccccgcaagcgtcaactgttctgcgcctgaagtagtcatggctcaactataagtgccggagccgaggtcggtaaaattttaccggcgcaggtaatcgagtacgtgggttaggtcgcggtcgttgatggctttgtcggcggcgagctgggtctttggcttggcacagaacgcgagacccaaaccggcggcctgaatcatcggaatatcgttggcgccatcgcccacagccacggtctggctcatcggaatacccaaacggtccgcccatgtctgcaaggcgtgtaacttcacagtcttgctcacgatttcgccgagcaccttgccggtcaagcacccatcggcaacctcaagccggttggcgatccaatagtcgatatggccttcggccgccagcatatcgaccacttcatggaagccgccggacaccacgccgatcttccaaccgtgttcatgcagcgtgtcgataagctccagcgcacccttggtgaaatgcagcttgtcatgcaccgtgtcgaacacggagatcggcaggccctccaacagggccactcgtgcgcgcagcgcatcgcagaactccagttcgccgcgcatggcgcgtgcggtcactccggcaatctcctcaccgcagccagccaccacgcccaactcgtcgataacctcttcgtcaatgagcgtggagtccacatccataaccagcaggccgggctcgctcagcgtcggcacagaaaccgcagaaccagccgggctcccaacttcgctctcggcggacttgtcaataaaatgcacatcttcttgcgtcatgcttctgattctgggaaaaccttgggacaatgccctctatgagtttttccatggcagccgccactattcttgcaaccgaccccacacccatctgcaccaccaccgaacccggcctgatcggcaccatcaccgactggctgatcatgctgatggaaaccatcggcggtatcggcgtggccttggccatcgccctcgaatccatcttcccgcccatcccgtccgaagtcatccttccgctctccggcttcaccgccgcacgcggcaccctgagtctgccgggcgcaatcatctgggccaccatcggctccgtactgggtgcctggaccttgtacggcatctcccgctgggtgggcctgcatcgcatcaatctcgcggcagacaaaatccccggcgtcagccgcaaagacgtgagcaaagccaacgactggttcaccaaatacggcacatggtcggtgctcatcggccgcgtgattcccgtggtacgctcgctgatttcgattcccgccggattcaaccgcatgaacttcctgcacttcaccggctggaccctgctcggctcggccgtgtggaacaccatcctcgtttccgccggttacctgctcggcgaccagtggtgctcgattcaaggcgcgctcggcgtgttcgaggacgtggtcatcgcggccgtgattgtggtcatcgtatggttcgtggtgcgaaaagtgcgtactgttatacgtaacaggaaatccgccgacggcaacgaatagggtctgccgactgccataagttgccgaaaatcccggatagaagggaagcgaagaacccgcatgagcgacaccgaagatctcgccgcgctgaacgatcgcctgatggccaagaaccatgcgctcgccgaagcgctgagccgcgccggcaaggaactgaccaaggcgaagtcacagctcgcccagctcgctcagccgccgctcaccttcgccaccatggtcaaggtcgattccacccgcaccgatgaagacggcatccagcacgcgtcggccgaagtcatttccggcacccgccgcatggtggtgcctgtggcctccaacgtcaacgccgcccgcctgaccgccggggccaccgtgatgctcaacgagaagctcgtgctggtcgagcagcgcgacgctgacaccgtgggccagattcgcagtgtcaagcaggtacttgacgacggtcgactgatcgttaccgacgcctccggcaatcccgtgctcatccgccgttccggcgcgctcgcgtatgcgggcatcaatcagggcgaccgcattatcgtcgatccgtccgtccgcctcgccatcgaagcgctgcccgccgagggcgacaaggatctggtgctggaggagaccccggacgtcacgttcgccgacatcggcggcttggatagtgagattggtcgtatcagggacgccgtccaactgccgttccagcatcgtgcgctgtttgagcgctacgatctgaagccgccgaagggcgtgctgctgtacggcccgcccggcaacggcaagacgatgatcgccaaggccgtggcgaacgccctgtgcgagggtggttacgatacgaatggcgacggctcgatcagcccggccgaaacccatgtcaagggcgtgttcctgtccgtcaagggcccggaactgctcaacaaatacgtcggtgaatccgaacgactgattcgcctgattttccagcgcgcccgtgaacgcgccgcggacggcaatccggtggtcgtgttcatcgatgagatggattcgctgctacgcacccgcggctccggcgtctcctccgatgtggagaccacgattgtgccccagttcctctccgaactcgacggcgtggaatcgctcgacaatgtgatggtaatcggtgcctccaaccgcgtggacatgatcgatccggctgtgttgcgaccggggcgtctcgacgtcaagattcgcgtcggccggcccaaaaccaatcaggccatcgccatcgtggaccattacctcaccgacgacctgcctctggaagatggcgtcgacgcgcacgccttgtccgccgtgctggtgcatgacatctacggaacctccgaacgccgccatctatgcgacgtgcaggaggagaacggccagtggcatgcgttgttcctggccgacgtggtctccggcgcgatgctcaagaacatcgtggaccgggccaagacccgagcggtcaaggaatccatcgaaaccggcttggacgtggcactcaccgtgccgctgctcgctgccgccgtggaagacgaataccgcgagacccgcgattccatggccgacgtggaccccgaacaatggtcgcgcatcaacggcatggacccgatccgccgcatccgtaccgccgaatagctcaagctcaaggagcactacatgaccgttaaacgagtgatgggcaccgaaaccgaatacgcggtatccctgaacaccccggaccgctacaatccggtgcaactgtccttcgacgtggtgaatggcgccgcggacagccacagcaaatccatccgctgggactaccggcaggaggacccggtcaacgacgcgcgcggcacccgtctcgaacgcgccgccgcccgcccggacatgctcaccgacgccccgcagctcaacatcaccaacgtgatcgcccccaacggcggccgcgtctatgtggaccacgcccaccccgaatactcggcgccggaaaccaccgacccgttcgaagcggtccgatacgaccacgccggagacctcatcatgcaggccgccaccgaacacgcccgcaaacagactggcactcccattgccctgcatcgcaacaatgtggatggcaagggctcctgctggggcacgcacgagaactatatgatggcccgcgcggtgccattcgacttggtcacacgcctgatgaccctccacttcgtcacccgccagatctacgccggctccggccgcgtagggattggcgagaacagcgagattccgggctaccagctcagccagcgcgccgactacatccacgccaaagtcggcctgcaaaccaccttcgaacgcccgatcatcaatacgcgcgacgaatcccactccaccgacgaataccgccgcctgcacgtcatcgtcggcgacgccaaccgtatggaggtaccgcaggcactgaaactcggcaccacgagcatgctgctgtggctgctcgaacatgcggacgaggccggattcgacctgaacgccttcctcgacgaactcgaactggccgacccggtcgaagccatgcacaccgtctcccacgacctgacgctgggcgcaagcctgccgctggccaacggcggcgaaaccaacgcatggcttatccagctcaaactgcgccaagccgtctaccaggtcgccgcactggtcgaaggcaccgacaccgccggcgagcccgcctggccggacaaatccaccacatccattatggcgatgtggcagcaggcgctcatcgactgcgcctccatccgccatgccgccgacgatgacgaacgtctggccatgaccggcgaggccagccgcatcgaatggctgctcaaatggcagctgctcgaaaaactgcgccgcaaaatcaccacaacgtccgcacccggcgtggccaacggatggaatgatccgcgactgaaggtcatcgacctgaaatgggcggcgctcgaccccgcggacagcatcttcaccaaactcgaaccccgcaccgaacgggtggtgagcgccgccgacatcgcacgcgccaccaccgaaccgccggaagacacccgcgcctggctcagggcaaaactcgtggcgcaattcggcgatgaggtggccgccgccagctggtcccgactcactgttcgcgacccgcacgccgcagacgagggcgaggctgtcgaattctacggcaatgccggccatatggccgctaccgaccatcacctgttctcccttgacatctccgatccgctcgccttcaccaaggcgcactgcgaaaccgaactcaattcagccgaacacgccatcgatctgctgaagtcgctggccatcaacgccgaacgatagacttggtagctatggaagaaacacgcgaagagaccccacaggacctgcgcaaccttgcgctcaaagtcgccggcctgctcgaagaagccggccagcatgccctccacgaccaactcaatccgcgtaacctcgcccagccgagcaccgagaacgcggaccgtggcccccgctacaagcttgaagtggacaacaagatcatgcgcttcatgagcgccagaatcgccgacatcgcccacttcgacggcttctggaccacccgccccgccgaaagccgccctggccagcgttactggtacatcggcaagatcgacggtgtgatcaactacgtacgtcgcatgagcgaatggacggtgaccgccgccctgttcgaattcggcccggacaacgagcccaagccgatcatcggcatcgtgcacgccccggccctcggcctgacctacctggccgccaggggagcgggtgccgtgcgcatccacaaaaccgcggtcggcgagaagcgcgacaaggtcgtgccgtcgatgacctcctcgctggatggttctgtgctgagctacggcatgtccttcatccccagcgaatcgcagcgtgcgctcgacgtggcctcctcgctcgccggacgcccggccgacatcaagcgcgtgggccccgtctcgctcgacctgtgcaaagtggccgacggcacctatgacgcctacttcgagccgatgctgcacgtgtgggatatcgcgggcatcgccgccggcaccgtagtggtctgggaggcacagggcacgctgagccgttgggacggcgaacgcatccactggcgtcacgataacgatgtagtggcctccaatggactcatcatccgcgaactgcagcattacctgcagcagtatccgtggctcgactccatcaaccagcgataattttttgactcctccggctcccctcgggtgaggggagccgtcggccgaaggctgactgagaggagtttgacagcccaagaagaagacaacatgccacaacaattcgaacaacctcaagcacagcaggccgcgacccaggaagacgacgccctcgccaccacgcaggccgccgcccaaaccgagtccaccgaccaagccgacgtgttggacgacatcctcgacgacatcgaatccgccttggaaaccaacgccgaggaatacgtcaacagcttcgtgcaaaaaggcggcgagtgatgccccaactgcgtgacagcggcacccgctccctgcacgccacggaacccgtaccatccgccgagatggacgggttctgccgtattttcggcgtcgaaaccgaatacggcgtggcggtcaccggtgccgaacgccccgtggacgccggccaggtggcgatgaccatgttccagcccatcgtctcccgttcccgctccaccaacacgtatctggccaatggctcacgtctgtatctggacgtcggatcccaccccgaatacgccaccgccgaagcgcgcgacccgcgcgaggccctggcccaggacctcgccggcgaacacgtgatgcgcaacctagccctgaaggcccagcgcaagctgcgcgaatcctacggcgcacacgccacgatccatgtgttcaaaaacaacgtcgactccgccggccacgccttcggctgccacgaaaactacctggtccgccgcttcgtgccgttggagaccatcgaacaccagctgctgccgttcctcatcacccgccagctgtacaccggtgccggccgcatgaccccggacggcttccagatcacccagcgcgcggacttcctggacgaggccgtctcctcggccaccacccgctcccgcccgatggtcaacacgcgcgacgaaccgcacgccgaccccgactccttccgccggctgcatgtgatcatcggcgactcgaaccgttcgcaatggtccacatggatgaagctcgccgtcacgcaccttgtgctgtgcgcgatcgaagacgccttccgccacggcgttccgtccggattcgagcagtatgcctttgctgatccggctgccgccaatcgcacggtcagtcgattccttgacaatccgcgcgccgaactgacgctcgaatcaggcgaatccgtgtccgcactgggtctgcagcgccggtattatgcggcggtcaaggccttcatcgaaacccatggcgatgcgctggcaggttcgctgccggccaccacgatcgacacgattatgggggagtggagccgcgttctggacgcgctggagcgtggtgcatacgatgcgctcgccgaccgcgtggactgggccgccaagaagtgtctgttcgacgcgctcaaacgccgtcgcccggacgtcaccttcgcccagatggaacagcttgagctcgactaccacgacatcgccaacggtcgcctgtacggttcgctcgtagcccgcaaccagatgcgtgagctgctgacaggagacaacgtggaatacgccgtgcacaatccgccgaccgacacccgtgccgccctgcgtggccggttcgtggacgcggccctgaacgtcggagcccagttctccgccgactggacccacctgaccctgaccgcccccgaacgccgggaagccatactcctcgatcccttcgaggccgagcccaccctgggattcgagcagcttatggaagcgctgaactagtccggaataatacggttggacaacacgtcacagcaccacaacaaaaagaccccgaccatctcggtcggggtctttgtcgtcagtaatgctcgaagtaatcgctacgagcagaaggtcactcggtgacggccttcttcagcagggagccagcggagatacgaacgccgtaggaagccggaatgtcaatctgctcgccagtgcgcgggttgcggccggtgcgagcggcgcgcttgacgcgctcagcggagaacaggccggtgagcttcaggccttcgccggacttcatggcctcgacgaacacatcctggaaggcgttaacagcagcctcggcctgagccttggtcaggttggacttctgggcgatcttcgaaacgaggtcagacttgttgtatgccataaagcatccttcttgggtcaggggacaagcacttttgcttagtccatgttgtcatcaatgatactagcgcatgtttctgcgaaaacccgcgttttataagggttttcacatctatttccccgaagggggtatgaaaatagacgaatcagacaagattatgcttgtcaagccacttcatggccgccgcgcccagcggaatgcgcagccagtagaacaccacgcggtgcagcaaagtggcggaaagcgccacgccctgcggcactccgaccgccacgaacgcgaatgtcagcgccgcttccacaccgcccagaccgcctggagtgggcactgcggaacccaatgcataggccagcaggaagacgaacgtcgtttcaatcggattcgatgaatggccgaacgcttgcagggccgcccagaaagcgagcccagtggtagcgttctggaacagcgcgcccaggcagctgactgtgagctgtcggggctgggaaagcacgtccagcagctggttgatatacgtcttggccagcggcataagacgacgggtcacccagtggcgcaacggcggaatcatcatcgcaatggacagcaccacgaccacaacgcccagcacgataaccaacgtgtttgtcgggattgcgccggagaacatgttgcggccggtgaacaggccgatgatgaccagcatggagaagtacacggcgtaatacaccacgagcgcggcgctcataattgcggtcgcctgggtgttgcgatagccggatttgcgcaggaactgcaggttgacgaacgaggggcccacgccggctggcatggatacggtggcgaagccgcctgccacctggctcatgaagacgcccatattgtcacgcttgtgccgcgccatcagggaaccgagcgaaatcgacgagccgatccagccgcagacaccgaacgcgagcgtcaccaccgccatcaacgggttggcgttggtcagcgcggtgatgatctcctcgggcttcagttgggtgaagaccacgaccacggccacgatgaccagcagcatggtgatcatcgaacgccaggagaatcgggccagcgtcaccggttcggcggattccaccgtctcctcgtcagccagcgcggtgatacgactcctcaggcccttgagcagctgcttgtcccaggattccagcgcgcgcgtgggggaggggaccgcgaccttctgaatgaacggggccaaggccgtcagagtcgtgtctccccacgcctcgcgggcggcctccaccgccggttccacgccgatcagcgcggcgaacagcactagcagctgaactttgtcgagcgcggtgttggccggaccggaagcgttgtcgccgttgagccagccggcaatcacggcggtgccgtcttcaagccgggcgagcgtgtccggcgtgatgcgccggtgcgtatagccgcgccggctcgccacggacaggtagcgcatgtaggccacggcatccgccttggtaagcgtgttcaggttggcgggcagctcgatggtgtgtgcatccagcaccagaatcgcggattcgtcggtatcggcgatgccgtagggtgcgggcgcgggcagtttgatattgtgcagacccagcagcatggcgaaatgatgctggacggcgtcacgcacggaacggtcacgtcggatggacacactggtgaaacgcacccagtcccacaactgcttcagatagccgacggtatgggtctgcgcgtcgatgacggaaacgatgaaacgacggttgtccgtggtatccagatcgtagatgcgcgagccttcggccagatcgtcgtccagcgtgacggccagtgaaccgtggccgacgccgggctcctgatgccgaatcagcgaggcggtgtccagtccgatgcctttcagggcggcgaccagatcttggccccacacgcccttgttctgcgtgccgaccacgaatcggatcagcatgcccactgtgcggccggcggccatcgacaccagcatgccggtgaccgaatgccacgacagcaccaccatcaccgcagcgatggcatacaggatattccagctccatttgaccgtggagcgggtgcggcgtggcccggcggcggtcaggaaggacgccatgccggcgtagatgtcgggcaacagcccggagccgtatgaggtggcggctgagaccagtgccattggcagggtgaaatcgttcagactgctgattgccgtcgatacgacccacaccatgccgtagccggcgaacatggccagcgcggacaccgcggcctgcagccattcccgggccagtagcaattgagcgagcacgatgatcacgatgacgatggtggccagctgcgtcagcacggtggaggggaagtcagccaaccagttgatgacctgggctgcggtgtgtgcgtcggattcgacgccgcgcgtcatgccgcccagatacacggcgaacaccatgaccacggcggccatcaacagcgacagaccggcccgggtcagatcgccgaagtcgcgcgtgcggcgcggagcgatgtcgtcgatgtacggtccggaatcgttgctgtcgtcggttgccgggctgtccggtccgctgacagcaaaactggccgaccggccgtcaccagaggcgatcggccggtcggtagtggaggaggtcgccttgtccgggcgatcttccgtagtggactgatcctgttcagtagtcatgaaatggtcacctgacgcctgtccttgttcggttcagtttgcggtttggtttgtgactcagcgcagtagtgtggtggatgcgaaggattcgagggactcgagggactcgagagactcgcatcgcgcctatctcagcggccgaaagcgacgagctggctggccacaccggtgtaggtggcgggggtcagagccttcaagcgagcggcggtttccgggtcgaaggactgctggtcgatgaactgctcgacctgttccttgttgatggtgcggccgcgcataagccccttgaccttctcgtacggcttgtccatgcccggcaggcccttgagctcgcaggcgcgcatggcggtttggatcggctcgccaagcacctcccagttctcatcaagctcacgctcgatgacgtgggtgttcgggtggatggactcaaggccgcccatgaggttggtcagggcgagcaaggagtagccgagcgcggaaccgatgttgcgctgggtggtcgaatcggtcagatcgcgctgccaacgggattccaccagcgtggcggagagggtgtcaagcagcgagcagctgatttcgaagttggcttcggcgttctcgaaacgaatcgggttgaccttgtgcggcatggtggaggaaccagtggcacccttgaccggcacctgggcgaacactccacgggagatgtacatccacacgtccacacacaggttgtgcatgatgcggttggcgtgggagacggtggagtacagctcggcctgccagtcgtggctttcgatctgcgtggtcagcgggttccaggtcaggcccatgcggttggtgacgaattcgcgggagacagcgatccagtcgacatccgggcatgcggccaagtgggcaccgaacgtgccggtcgcgccgttgatcttgcccaggtactcctggttttcgatgtgcttgagctgacggttcagacggtagacgtagacggcgagctccttgccgagcgtggtcggcgtggccggctggccgtgggtgagagagagcagcggcatatccttgaattcctcggccttgccggcgaggtggtcgatgatgcgcttgaactccggggtccacacgttttccatcgcgttcttgacgcaacgggcgatggagaggttgttgatgtcttcggacgtgcaggcgaagtgtacgagggtcttcagctcgtcgttgatgttggtcagctcggccggagccttgtcgatctgatcatcgatgtagtactccacggccttcacatcgtggtgggtgatggcctcatgagcggcgtgctgcttgatgccttcggcgccgaagtcctcgggaatggcgcgcaggaaggcctgctcttcggcagtgaacggcttgacgccgtcaacgatcggctggttgccgttgccctcaaagccgttggccagaagaatcatccattcgacttcgacacgcatgcgttcgcggttcagggcaggttcgctcatgtattcgacgagcggggcggtggccttgtgataacggccgtcgagcggggtcaatgcgattgcgggggaaatatcggtaagcttcataacctccaagggtacttccagccgtgaaccgagtgactatactgtggtgcggcgttcccgcccgagccgcacaggtcaaggaacgcccgtggttcgattactgtgtgcggcctttaaggctaggagatcaccatgcctgcaaccaccattcatactcctccgaaacgtccgattgccgtatcgtcactgaaatggcagccgttggatatcgcggtcggtgccacgctgggtgcggcctgcggcgtgatcttctggggattcaacttcgcgtacatgccgatctcttcggtattcggcgcgattctgcccggtttcgccagcatcgtgcacgccgtctggtacttctccggtacgctggcggtgctgattctgcgcaaacccggagcggcactgtacgtgaaccttatcggcacgctggtcgaaacggtgattggtagccagttcgatttgggcttcgtgattatctcggcgctgttgcaaggtgttttcgctgagattccgttcgccttgacccgttaccgtatgttcaatctgccgatttccattgcatccggtgcgttggtcgccttggaatacggcacatatctgatgctgtttcgttacgtgggtgtgtcattcgtcagcccgcgtggcattgtgcacatgatttccgaggtcaccggcggcgtgcttatcagcggcgtgatggcctggtatctgatgctggccatcgccaaaaccggtgtgctcgaccgcctcgcatccggccgcgcactcatcgagcgacgcgcctgacactctttgcgcgccactctcccgggaatgttgcgctgatagaggggggtttcgggcatgctggcgcaacaatcccgggaaagtggcgctagccgcgtctctgcggtgattgcattgtggggtagccgattgatgctaagcattgacaagttgatgtgcccgttgccgtgagaccccgagtatatcgcctatttgctgtagggcgagacccatgccatgtagttcttgtgccgcggcgcgagtttcccgcgctgcgttcgatctgcattccgcttcttccttgcgcagtcgccgagcttcatcaagatgctcctgcacggattgcggcagctttgtctctacggtgagtgcgaaatcagcatcttgtgtcatgacggtgataaggtcgcgtgccatactttcaatctctgctgttgttcttgcctgcgtgaaaccgataccgggaatctcaagaatccagtatttttcgccagggcgaacgatgacctgatatgttttcactgctgataccagcctttcccgagtttggcttctgcttctttgcaaataatgtccgcgaggttgttgtcgatttcgttatgtcgtgggatggggaatcataagtccgtcgagttggaatatctcatgactccctccttgcctgatactttcaaacgtgacattcttgcgttctgccgcttgcttcatcagtttgatgagccatctcctactcgtcattatattgttaactcctttcttgacaactctgtcaagtgtggtatttacttttaaccgccgaacgtgctgaactcggtggttcgctcgctaggggcaatggtcgcggactgggtcatgcggccttggtagtagcgggtttccttgagctctccgttgataacttcctggaaatgggcttcgtggcgttgcacggcgggggagccgaggtcggtggcgttctgataggcggcctgatggtatttgatccagtgcgacaactccctgccgttggtcgaaccagccacgggtgcggcgtcatatggggtcaggccggtgatgggcgttgcgccgggagtgcatgagccgtccgaatgcactgtggatggtgttgccgcgggcgcgggcgatacatgcccttgtacggtgagccagttatcggtgaccgggttggcggcaccatccagcgcggcgaccagttcatcatcgatttccacgctggtgacccacgtgcgttgcggaatcggatgattggccaccggcgatccggctgtcaccacatgctcgatggtatattcctccgcccaatccgaggcaagcgtggcggcaacgataccaccctgggaatggccgatcagcgccacgggctcatccttgccgatgcctgcctgacgcatcgcctcggcaaccatgcgagcgctgtccgctttcctgcggcgctcctgatcggcgctcatcagttccacgttctgcgcccagccaaatggtgagtcaggttgtccatcggtacccgggatggtgaccagccaggagttggttccatcagatcgttcatagcgttgaatggcgatggtcccatattcgagtccgctgttcagctcgattttgccgagccgctcttcggcgagcctgcgcagattctccattgactcggccaccgatccgcttgcgcggacaacgtcggcattcgcctgcacctcgcgcacgtccagatgattgccttggacgacgtctttcgccgggccggagaaattggcgattttccccgcagccttgttgacctcatcggtgtgcgcaatgctcttgccgataggtacgccgccaatgattccgcccgcgccgctaagcactccttcctggaacggataggtgaacgtggacatccatgccgggttcggtttgccgtcaatagtccagccggccagaaagccgcccgccgccacagcggcaacacccgccgcggcatatcccggtttggcctgtgtgccggcctgcaataattcggtaaacatgcgccgagccgtcatctccgcctgagaatacagagagtgtgcgcgaatcagcagatcggccgcgccacgcagatcatcgctcaaccgctgacatgccgttgcatggtcataacaccgattgcccagcgcggcatatggtgcagtgacatggccgggaacaacggcgctcggatcgcccgactgcaaggtgacgcacatcggcgcactatgccgatgtgactgcaactgtaatgcggccgattcccaagccgtggctatggccgcaaatcctgccgcctcgtcatcgagagccttggctatggcggcatattcttcaagagtggctggcgcatatcccactccgccgtaaacggacgattccacttgccagtaatcgtgctcgctcatgacgacccccaagccaatcggtgggtggtctccatgtcttgcgcgagactggccgaatactgtgcggtgcgactgagccgcgatcggaatagatcggcggctttaccggtccacacgatgttgctggagcggttcacggccaccgccgtctggtccgattgcgccagtgtggccgcacgctggacggacacgaggtcgcgactacgctgtaccgccgcatggcaagggcaagtgccgtaatcgaacggcgtcaccgtattgccggcaaagccgccggtgggatcgatgggtgctgggttgctggtgtaggtattcatatatccagctaaaaggacaagactcatgcttgtccagccggaacgaccaatgtggttctagcttgccgattttgggtgaagttatccccaagtgttgtgcatagtcgtaacgattatccacaaatagcctgtttggacataccttggatcagccatggcctatcgaaaattggataaatgccaaagccgacagccgaaaccgggaaacagccgcgataaagccatgacccgtgagggtgtgagaaaaaagaacaactgtgaacgactgcttaccacggcttggtagccccggtacccttgttctgcgtcgctttctgctcggattgggtggtgttcgactgggtatcggtggattgctgattggccttcatcagctcctcgacctgcttcttctgttcgtcggtcaacgcgccgccctttttggcattggatgaagaattctcggattgctgtaccgactgggcttgcccggaatcggaaccgctgttctgcgcctcggcctgtttcagggtgatctttgtcagctcggaagaaatcgaagcattggtgtcgatggcgtccttgacttgcggcaacagaagcgtgcgcattcgcccggcctcgtcgaattgcgcgtcggtctgctgctgttgcgccttgagcgtggtgatatccgtggactcgtcctgagccgctttgatattggcgttcaatgatgcggtggcctgattgaacgtaatcgaagcggacaggtttactgccgccacgccggcaaccagcaacagcaatacggcgccacaagccaggacgatacgtgcccaaagcggacacttcgcccgcatccgagtattcgccgagccatcgttctcgtggatttcgttactgtttctcacagcagtctccttgaggttgcgatccatgcaccgacttccatggcaagcaatatcgccaacgcaatggccaacggccataccaccggcgtggtgcgtgtgcgttccctgaccgtggtggtcatgcgccactgcttcgacgacttggccgaaaccgaatccgccaaagtctgtgaagcgttcacggccacatacgtgccactgatctcgtcggcaatgtctttaaggttcttctcatccatcttggagatgccgggttcgccggtatccgggtcgaccacccagtggtccgtggtgttggaatcgccggcactgacgccatcggcgatgacgggaatcttgccgccctcggtcgagccgacgcccacggtaaacccatcattgagatactggcgcagtgacgagaacgtacgacgcgtcacattcgaggtctgttcgccgtcagtgatgaggtacagcacaatcgcatcatccgggtgcgcttcacgaatcgacttcacggtcagcagcaattgatcgatcggagcatccagactggagcccgccgacacggatgtggcttccaccgccaacgtgttggcccaattatcgatggccggcgcatccggggtcagcggcacatcaagcgtccccgaagcaccgaaccgtaacgccgcgaaactggcgtccggataagcggcggtcacatcatgcacggcctggcgtgcggcatcgatgcgggtaatggtcttctcggacccgtatgtggcgtcggccaccgccatcgacccggtggtatccaccgccacaatgacgtcggtggcattgatggcctgtgaggtggtagacgataccacgctgggagtcagtaccatcaccgcgacgatgagcagcataagcgtacgtcgtatgcaagcccacacggtctcgtcactggaagcacggcgacgaacaaataatgcgatttcgagaatggccagtacggcgagcccggccgccagcagtccgccggcgacccagcccaaggcgggggagaaggtgaatccgttcatcgcctcaacctccatgcacatacgatccagataatgagtatcacggccagagcaagcgtccacagaccgggagcgtccaccatcgaggatttcgccttgttctccacatccgtatctctacgcgactgaatatcccgtaccagctcatctatcgacgcgccattcgattgggtgaggaagatgcctccatgcgactcgatcgcggacttcatatccgttgtggtttggtccgattcactggctttcggcccggaatacaggccgtccacggtgattttggtctgctgggtcaaatccaacgcttcggtcagcgaataggtgggcttgcccgacacgacgttgtcggtggccagcacgatggatgccgcacgctgacggtcggcattcgcatgattggcttcgccataagcgaaaccggggagcatcgccgcgcaagacaccacgccgtcgccaatcaaggaggtggcgtccttgcggttctgcgtgccttcgagccaattggcgatgtcctgatattcggcatcggacatcttatcgatgtcatcctgcgactcgacgcctttcagcgccttgctggcggaggtcaactgtttggtgaccagttcgtagtcgtcggtcagcgggaacaccgtgcgtgaggtcgagttgaagatactcaaaccgatacgttccccctcgaaatgcttgaccagttccaaataggtatcgatgacctcgcgatcataggggagcgtggaccccgacacatccagacacaggacgatatctcggctggaagcgcgttcgtcaccggcgtccacttggcttgggcgagccaccagcacaatggccagcgccagcgcaagcaccagcacgctgatggcgagacggcccaaagcgcgccattgacggaacaggcgggaagcgtgctcggtattgagatcgtcatccatcgagaatacaggggtgtcgtcggcggcgttacggcgggcgaacacgacaatcagcacgataatcgccagcgtcgccaagacgccggccagagcggcccaaggccaatgccatgccagcatcatgaacgccacctttccaccagattcgccacccactcggcggcctgctgcacgctggtcgtctgggcgattcggttgcgggcatcatcggcaaattccggtggatacaacgcgccaatggtctgcttcaatgcgtccaatccttggcgattcgcgggcgtgcgattcaggtacgccaaatcggtcagcgtactggaactaagctccttgcctgatgcggcaccggcgaaatcacgggcgatgacggacaattcgacgaaagcctcatgccggggcagtgctccggattcatgacgggccaccacatcgtcgatgcgggcacgccactcggccttggagctggcattgctatgagcgccacgcgcgcggtcgctgttccgaggtttgcgtgcggggcgagccagcatgatgatcaacgcgatcagacctaccgccagcaacaggcatgcgacgatggccaccaccaggggagtggtcaaggccaacgactccacgggcctgagatcgccgggatcagtggcgagcgggatgatggggaacatgctgtgcatcatagatcacccgccaaagtcagtccgaccagttcgggtgcagtgcccagtctattgcgtgtggtgcgggccaatgcccgggacaccagggcgacgaaacgatcgaacatggattcgctggatgcggcgcgaatgatatgggaaccggcacgggtgagctcctgttccaaagccgcggccatatacacgcgatgagtatcgacctcggccgctgccttggcgttgcgcaggaatgccggcacacgccgtgcactcaagccgtcggcgggagcgtggcgggatgagacggccttgaacggattcatcgtcgccacatcgatcagcaccatcggatgggtgcgggtaatacgacggatcgtggtgatatgccgctcctccatcgcatgctcatcggtggccaatacgatcaatgcctcacgatccttgatacggcgcgcatattccagcagcgcgtcgatattacggtgatgatcccaatcacgatcaagcgccttgtccagcgtgcgttcgaactgcgcgaacccaccgttgaacggcacgcgggtgatactggactcatcgccgaacaccagcgaaatatcgtccgaccggcgcaacgacagtgcggcgaacatacgcagcgcatttgcggcaacctgccatgcgcgttctccggaagggcatacgccagtcatctccaggccaacgtccatcagcaaccagacccgtgacgtcgacaggcgctcgcgctcgaccaccatggggcggccttggcgggcgctggtcttccaatcgataagacgggattcgtcgcctggctcataggcatgcacatccatcgcatcgccgctgccgccacgacgcccggatgcgtgttcgccctccagcgcgcccaaagccttccttacggtaggcaggctcagctgagtgccaagggcctcgatcttcttgcgaacggaatcggaactcacggaacaggaaccgtttcgacgatcttgtcgacgatctgatcgctgaccacgccatcggccagtgcctcgaacgtcagcataatacggtggcgcagcacctcatgagcgaacgccttgaggtcctcgggcaccacatagtcgcgcccggacagcaacgccttcgcctggccgatacgggtcaaggcgatggtggcgcgcggcgaggcgcccaaacgcaccaaggacgacagtcccttgatggggcgggagccggcacctcgtgacgtggcggtgatatcgaccgcataacgcatgatcgcgtcggaaacatgcacgcggcgtgccgccttgcgcaaaaaatcaacgtcggacacggaaatgcgttcgccggtgatggtgtcgggaccgatcatatcggagccgcggcgggtgagcatggccagcatccgagcctcttcgtcgggcgaaggataggtcatgacggccttcatcatgaaacgatccatctgggcttcgggcaggttgaacgtgccctcctcctcgatcggattctcggtggcgatcaccatgaacggcttgggcaaggcgatacgctgcccgccgatggtcgtggcaccctcggccatggcctcaagcatggcggactgggttttggcattcgaacggttgatctcgtccagcagtacgaaattggcgtgaatcggaccgatctgcgtggtgaacttctgcgacgcaaaatcgaagacctgcgtgcccaccagatcagatggcatgagatcaggagtgcactgcacgcgcttgaacgagccggatacgcaggtggcgagcgtctgggcggccgtggtcttggccaagcccggcacggattcgataagaatatgcccgccggccaccaaggtcacgataagcgattcgcgtagattatcctgacccaccagtgtctgggcgaacctcgcccgaatggcgtcggccaggatacgtgcgcgtttggcgtcatcggcacccagcggagccgacacgccgggcgcgggaacggtgaccggtcgtgcggcggtggtcggcgaaggtatgttcggttgcgtggggaacaaagtcatgccccccactgtaactactcacaatgactgttggcctgcctaaagagtccaatccaccgggtcggcacccatggtgactagggcttgattggctctggagaatggtttggagccgaagaatccgcgggaagcggacagcggactcggatgaggcgatttgataatgaaggcattggtcagcaatggctcgaggctttgcgcattacgcccccagagaatcgccaccagcggctggggcttgccgtcggcgtccgtgcgcgcgttcaacgcacgaatcgcggcctcggtgacttcctcccagcctttgccctgatgcgaatttggccgcccgactccgacagtcagacatctgttgagcaacatcaccccacgttccgtccacggtgtcagatcgccgttggtgggcatgggcaccccaaggtcgtcaaccaattccttataaatattgaccaggcttttcggcagcgggtgaacatttggcgccacgcagaagctcaaacccaccgggtgacccggggtcgggtaggggtcctggccgacaatcagcaccttgatggaatcgaacgggatggtgaacgcgcgcagaatattgtggcttgccggcagccacgggcgcccggcggcgttttccgcacgaagaaaatcgcccatatggtggatggtgggctccacgtcggccaaggcatgggcccaccctggctctaccagttcgctcaatggtttgatcatgactcaccactgtagtcaaacgtgcatatccggtgcatggggcgtggtgtggtggactgatgagttgtttgccgattacactcatgggtagttttgataggaagaaagggcgattatggcacgcgacacgatgacctacgaatcctatgaaccggattccttcgacaatcctccgaagggaccggtgggagttcaccgtggcgctcgttcggtaatggcccgcctctgcccgttcatcgtcgttattctggtggccgcactgtgcggtgtcggggcctgggcatggatttccggagaatacaagaatgtaataggaggatcgtcccagacggcgaccacgtccaagtccgattcgtccagcaaggctgagaccaagaacagcaccaaggatgattcctcgtccacttcgaccgattcgtccaaggactcgacctcggattcggcaaagtccgataccgacagtgacacgacatcctcgaatgagaatcaaaactccgatcagcagtctcagcagtccgaagccaccgcgactgtgaataaggccacgcaggtgcgtgtggtcaacgccacaggaatccaaggatatgcaggtcagcaggccgatgtgctgcagaccgccggttacaccagtgtcgaggcgaccaatccgagcggcacattgccggcttcttc

SEQ ID NO: 2 - DNA, 3627 bp, Bifidobacterium longum
gcgcgctgctcgaacgggctggattccccccagtcctcgggttcgctcagatccagcggctcgtcgccggacggctcgggccggttcgctccccgcgcctgtccctcggcccgttcccgctgttcggccatgcgcaatgcgaggtctttcacctgttcggggcttggccgctcgcctgcggcttgctcggcctgttcgagctgcctctccagttcggccacgaggccggttctcggctgcatgtcgtggtcgtggatggccttggtggtcctcatgcggaacctgttggcctggtcccagtcggcgggaatctcggtgtcctcgagccatggcaccgccccgcgcagcctctcggactgctctccggccacctgttcggcgttcctgcgcagcctgccgcgctggaacatgcccgcgtccctggcctcgcgcgaggcctcgcacgccacgtcgatgatctgctttgcggcctcaaactcctcggtgccgtggtttttccaccacgtctcgcggttcctcacgtcggccctcgcgtccatgagcctgccgcgcagcgctgccgcatggtcggccctgtcggcttcgagctggcggcgcgcgtcgccctcgaaataccgccagttcggctccctggccgcttccggccgcgcctggcgttggcgcagctggccgatcttggcggcgaacagttcgcccaggcggtcgaatatccggccgagttcgtgtcggatggcggtcagcaggtcgttgctgcgcctgatctcacggttggtctggcaccgctcgctgacgcctccggcccgttcgatggccctggcggcgtagccctcgtggatggtgggttcgaggtcgctgccctggtcctcgaggctcctgtggtcgattctcgcggtctcgtccagccgcgcgttacaggtcttcgcccaggattcgcgcagggactggagcttggccttccggtcgagcgggttcagggacacgctcgtgcgcttccactgcctgcggccccgcttgtcgagcttctgcgccccggtcttcgggtcgatcagcggcacccgctcgccccgctcgtccagcacgtactccatgcgctgcttgagtttcgcccagccgcccgtcttcgggtcgatctgccggttggcgacgaggatgtgcgcgtgcggattgttgccctggccgtcgtcgtggatggcgtaggtggccgcgtagccgtccgcgttcaggttctcccggatgtagccctccagggcctgcacgcgctgcctgggggtgaactcgcgcggcagggccaccacgatcttcttggccggcctcgccgtccgtccggtctcgtgcagctcgaccgcgttgaacagcacggcggggtcggcgaactcggccggggccccctccggcagcagggtgccgacgcgcagcacgcgctccttgcgcccgtagtcgtaggtctcgccgcgccgctcgtcatgcacccgcttgccggtgatgtacgagagcgtggccgtggccctggaaccgctcgcgcggctcacgttggagacggacagatggtagatcgccatcggcttcggctcctttcgtgatcggccagggcggcggggtgcggggcggcggccctgcggcaaggggttcccaggggtgcggcgagcacccgctgggcctgccgggaggctcccccggaagggtgggaatccaaagggcaaggcccgtggcccccggagggcgcgcttacggaaaatgcaacctccggttgcatgtaagtgcgccctaatctttgattagggatttccttgctggtagaatcatatcaccatacggatgatgcagaccatgtaaggagccgtttcgatggtgaagagcctggatgagcagatcaagtccctgcaggagaggcaggcccagctcaaggcccgcgaggacgacctcaaggcgcggcgcagggaacgcgaacgcaaggcccgaaccaagcgcctgatcgaggtcggcgcgatggccgagtcggccgccggcttcgagggaggcgacgagagggccaaggaacacatcgcccgcctcgtgcagctcggctccctggtggaagccatgtgctccaccgacgtgatgggcaactacacgagccgcgaggacctcagggccaccgtcgccaaggccctggaacacaacgtcaggaccagcgacggcatgaactggaacctgcacgacctggtgtacgaggcgctgagcgaggaatgggccaggagggacggcgagatcggcgacccctgggcggacgaaccagccagcggataccagccgccctcatacgagcccgtcaaccccgaacgcaggactccccaaacgccctccgacggcctgatctgacgtccggaaaaaggcgctttgcgcccttttataatcttttaaaatctttttacattcttttaggggtcccgcagccctactctcccaacgagtttcggacggaactgagtacaaaataggagcgaattgagtacaaaataggagcggactgagtacaaaataggagcgaattgagtacaaaataggagcggactgagtaagtaagtaatttttatactcagttgtgctatgctgtggttatgtccaatgaaatcgtgaagttcagcaaccagttcaacaacgtcgccttgaagaagttcgacgcggtgcacctggacgtgctcatggcaatcgcctcgagggtgagggagaggggcacggccacggtggagttctcgttcgaggagctgcgcggcctcatgcggctgaagcagaacctgaccaacaagcagctggccgacaagatcgtgcagacgaacgcccgcctgctggcattgaactacatgttcgaggactcgggcaagatcatccagttcgcgctgttcacggtgttcgagaccgacccggcgaaccagacgcttgaggtgagcgtgaacgagcgattcgcgttcctgctcaacgacctgaccagccagttcacgcgattcgagctggccgagttcgccgacctcaagagcaagtacgccaaggagttctaccgcagggccaagcagtaccgcagctcgggaatctggaaagtcagccgcgacgagttctgccgactgctcaacgtgtccaagtccacgtctgactcggtctcaaacctgaacagagtcgtgctgaagccgattgtcgaagagtgtggcccgctccttggcttgaagatcgagcgccagtacgcgaagcgtcggctgtcgggcttcgtgttcacgttcgcccgtgaaaccccgcctgtgatcgatgccaggccggtgaaggccaaggaagagcaagattccggccattggacgagtgtggcgggctatggcgaggtgttcacgaccactgagctgttcgacgtgacggcggcgcgtgaccacttcgacggcaccgtggacgcgggcgaatgccggtactgccggtatgacgctcgcaaccgcgagcggcacgccaggaacgcggggacgctgttctagcggccgtggccgcgcctctggggcggttgtgcgctccatgggtcgatctgccgctgttcggcttcctgacggcctgtgcgcctgtctgcgcgctgtttgagttccccgagcaggtcggccttggtcttgggggtgg
